(19) United States
(12) Patent Application Publication
(10) Pub. No.: US 2022/0064665 A1
(43) Pub. Date: Mar. 3, 2022

(54) METHODS OF GENETICALLY ALTERING A PLANT NIN-GENE TO BE RESPONSIVE TO CYTOKININ

(71) Applicant: Wageningen Universiteit, Wageningen (NL)

(72) Inventors: Rene GEURTS, Wageningen (NL); Jieyu LIU, Wageningen (NL); Luuk RUTTEN, Wageningen (NL); Olga KULIKOVA, Wageningen (NL); Ton BISSELING, Wageningen (NL)

(73) Assignee: Wageningen Universiteit, Wageningen (NL)

(21) Appl. No.: 17/298,916

(22) PCT Filed: Dec. 5, 2019
(86) PCT No.: PCT/EP2019/083770

§ 371 Date: Jun. 1, 2021

Related U.S. Application Data
(60) Provisional application No. 62/776,325, filed on Dec. 6, 2018.

(51) Int. Cl. C12N 15/82

(52) U.S. Cl. CPC C12N 15/8295; C12N 15/8227

(57) ABSTRACT

Aspects of the present disclosure relate to genetically modified plants comprising NODULE INCEPTION (NIN) and NIN-LIKE PROTEIN (NLP) that have been genetically altered to be responsive to cytokinin so that the NIN or NLP protein can induce root nodulation upon appropriate signaling.

### CROSS-REFERENCE TO RELATED APPLICATION

[0001] This application claims the benefit of U.S. Provisional Application No. 62/776,325, filed Dec. 6, 2018, which is hereby incorporated by reference in its entirety.

### SUBMISSION OF SEQUENCE LISTING AS ASCII TEXT FILE

[0002] The content of the following submission on ASCII text file is incorporated herein by reference in its entirety: a computer readable form (CRF) of the Sequence Listing (file name: 794542000540SEQLIST.TXT, date recorded: Nov. 25, 2019, size: 3,802 KB).

### TECHNICAL FIELD

[0003] The present disclosure relates to genetically altered plants. In particular, the present disclosure relates to plants with NODULE INCEPTION (NIN) and NIN-LIKE PROTEIN (NLP) genes that have been genetically altered to be responsive to cytokinin so that the NIN or NLP protein can induce root nodulation upon appropriate signaling.

### BACKGROUND

[0004] Nodulating plant species, such as legumes, Parasponia spp., and actinorhizal plants, have evolved to form symbiotic relationships with nitrogen fixing bacteria. They form specialized organs called nodules to house these bacteria, which provide an optimal environment for the bacteria to fix nitrogen and provide it to the plant. In turn, the plant provides the bacteria with carbohydrates and other resources. The initial step of nodule formation is the recognition of the presence of symbiotic bacteria, for example by the detection of lipo-chitooligosaccharides (also known as Nod factors in the case of rhizobial bacteria) produced by the bacteria. Recognition of such symbiotic signals induces nodule organogenesis and allows bacterial infection.

[0005] Genetic screens have identified genes involved in the nodule organogenesis process. Chief among these is the transcription factor NODULE INCEPTION (NIN), which has been shown to have a key role in nodule organogenesis across multiple plant species, such as legumes and Casuarina glauca (Clavijo et al., New Phytol. 208: 887-903 (2015)). While the essential role of NIN has long been known, attempts to complement nin mutant plants have consistently failed. This is attested to by numerous examples in the literature. Clavijo et al. used a 2175 bp Medicago truncatula NIN promoter, and reported, “unfortunately it was not possible to complement M. truncatula nin mutants for infection even with the ProMtNIN:MtNIN construct” (Clavijo et al., New Phytol. 208: 887-903 (2015); quote from pg. 898). In characterizing the Lotus japonicus daphne mutant, Yoro et al. stated, “although NIN is a key transcription factor in nodule development, the functional NIN promoter region necessary for nodule organogenesis has not yet been elucidated” and observed “only IT formation, and not nodule formation, was rescued in the L. japonicus nin-9 mutant by the introduction of the L. japonicus based construct ProNIN(˜4 kb)::NIN::TerNIN” (Yoro et al., Plant Physiol. 165:747-758 (2014); quotes from pg. 756). Finally, Vernie et al. found that expression of M. truncatula NIN using a 2.18 kb MtNIN promoter was only partially able to complement a M. truncatula nin null mutant, which when transformed produced a very low number of apparently non-functional nodules a long time (fifty days) after inoculation (Vernie et al., The Plant Cell, 27:3410-3424 (2015)).

[0006] This inability to complement legume nin mutant plants has meant that the precise mechanism of NIN involvement in organogenesis has remained elusive, because important components of NIN regulation and integration with nodule organogenesis processes were not known. More importantly, as NIN is the key player in nodule organogenesis, a successful nodule engineering approach needs to incorporate NIN. The failures to complement nin mutants over the past 20 years have been a huge roadblock to developing nodule engineering strategies. In order to successfully engineer nodulation, the ability to complement nin mutants, and the knowledge of NIN regulation that comes with that ability, will be required. There exists a clear need for identifying NIN regulatory regions that in combination with the NIN coding sequence will allow full complementation of nin mutants.

### BRIEF SUMMARY

[0007] In order to meet these needs, the present disclosure provides means of fully complementing legume nin mutants by introduction of cytokinin-responsive elements into a regulatory region operably linked with the NIN coding sequence. The present disclosure further provides means of introducing cytokinin-responsive elements into plants operably linked with a NIN or NLP coding sequence that may be endogenous or heterologous.

[0008] An aspect of the disclosure includes a genetically altered plant, wherein the plant or a part thereof includes one or more genetic alterations that increase activity of a NODULE INCEPTION (NIN) protein or a NIN-like protein (NLP protein) in response to cytokinin signaling as compared to a wild type (WT) plant without the one or more genetic alterations, and wherein the plant or the part thereof includes a nucleic acid encoding the NIN protein or the NLP protein. An additional embodiment of this aspect includes the one or more genetic alterations being addition of one or more, two or more, three or more, four or more, five or more, six or more, seven or more, eight or more, nine or more, ten or more, eleven or more, twelve or more, thirteen or more, fourteen or more, fifteen or more, sixteen or more, seventeen or more, eighteen or more, nineteen or more, twenty or more, twenty-one or more, twenty-two or more, twenty-three or more, or twenty-four or more cytokinin response elements operably linked to the nucleic acid encoding the NIN protein or the NLP protein. Yet another embodiment of this aspect includes at least one of the cytokinin response elements being a B-type cytokinin signaling RESPONSE REGULATOR (RR) binding site. A further embodiment of this aspect includes at least one of the B-type cytokinin signaling RR binding sites having the sequence of SEQ ID NO:613 or SEQ ID NO:614. Still another embodiment of this aspect includes at least one of the B-type cytokinin signaling RR binding sites having the sequence selected from the group of SEQ ID NO:551, SEQ ID NO:552, SEQ ID NO:553, SEQ ID NO:554, SEQ ID NO:555, SEQ ID NO:556, SEQ ID NO:557, SEQ ID NO:558, SEQ ID NO:559, SEQ ID NO:560, SEQ ID NO:561, SEQ ID NO:562, SEQ ID NO:563, SEQ ID NO:564, SEQ ID NO:565, SEQ ID NO:566, SEQ ID NO:567, SEQ ID NO:568, SEQ ID NO:569, SEQ ID NO:570, SEQ ID NO:571, SEQ ID NO:572, SEQ ID NO:573, SEQ ID NO:574, SEQ ID NO:575, SEQ ID NO:576, SEQ ID NO:577, SEQ ID NO:578, SEQ ID NO:579, SEQ ID NO:580, SEQ ID NO:581, SEQ ID NO:582, SEQ ID NO:583, SEQ ID NO:584, SEQ ID NO:585, SEQ ID NO:586, SEQ ID NO:587, SEQ ID NO:588, SEQ ID NO:589, SEQ ID NO:590, SEQ ID NO:591, SEQ ID NO:592, SEQ ID NO:593, SEQ ID NO:594, SEQ ID NO:595, SEQ ID NO:596, SEQ ID NO:597, SEQ ID NO:598, SEQ ID NO:599, SEQ ID NO:600, SEQ ID NO:601, SEQ ID NO:602, SEQ ID NO:603, SEQ ID NO:604, SEQ ID NO:605, SEQ ID NO:606, SEQ ID NO:607, SEQ ID NO:608, SEQ ID NO:609, SEQ ID NO:610, SEQ ID NO:611, SEQ ID NO:612, SEQ ID NO:615, SEQ ID NO:616, SEQ ID NO:617, SEQ ID NO:618, SEQ ID NO:619, SEQ ID NO:620, SEQ ID NO:621, SEQ ID NO:622, SEQ ID NO:623, SEQ ID NO:624, SEQ ID NO:625, or SEQ ID NO:626.

[0009] In yet another embodiment, which may be combined with any of the preceding embodiments, the cytokinin response elements are within 100 nucleotides, within 90 nucleotides, within 86 nucleotides, within 80 nucleotides, within 70 nucleotides, within 60 nucleotides, within 50 nucleotides, within 40 nucleotides, within 30 nucleotides, within 25 nucleotides, within 20 nucleotides, within 19 nucleotides, within 18 nucleotides, within 17 nucleotides, within 16 nucleotides, within 15 nucleotides, within 14 nucleotides, within 13 nucleotides, within 12 nucleotides, within 11 nucleotides, within 10 nucleotides, within 9 nucleotides, within 8 nucleotides, within 7 nucleotides, or within 6 nucleotides of each other. In an additional embodiment of this aspect, the cytokinin response elements are within 11 nucleotides of each other. In yet another embodiment, which may be combined with any of the preceding embodiments, the nucleic acid encoding the NIN protein or the NLP protein is operably linked to a promoter that is operably linked to the cytokinin response elements. In an additional embodiment of this aspect, the promoter and the cytokinin response elements are within 60,000 nucleotides, within 55,000 nucleotides, within 50,000 nucleotides, within 45,000 nucleotides, within 42,000 nucleotides, within 40,000 nucleotides, within 35,000 nucleotides, within 30,000 nucleotides, within 25,000 nucleotides, within 20,000 nucleotides, within 15,000 nucleotides, within 10,000 nucleotides, within 9,000 nucleotides, within 8,000 nucleotides, within 7,000 nucleotides, within 6,000 nucleotides, within 5,000 nucleotides, within 4,000 nucleotides, within 3,000 nucleotides, within 2,000 nucleotides, within 1,000 nucleotides, within 500 nucleotides, within 400 nucleotides, within 300 nucleotides, within 200 nucleotides, or within 100 nucleotides of each other.

[0010] Still another embodiment of this aspect that can be combined with any of the preceding embodiments includes the nucleic acid encoding a NIN/NLP1 orthogroup protein. An additional embodiment of this aspect includes the NIN/NLP1 orthogroup protein having at least 70% sequence identity, at least 75% sequence identity, at least 80% sequence identity, at least 85% sequence identity, at least 90% sequence identity, at least 95% sequence identity, at least 96% sequence identity, at least 97% sequence identity, at least 98% sequence identity, or at least 99% sequence identity to an amino acid sequence selected from the group of SEQ ID NO:1, SEQ ID NO:2, SEQ ID NO:3, SEQ ID NO:4, SEQ ID NO:5, SEQ ID NO:6, SEQ ID NO:8, SEQ ID NO:9, SEQ ID NO:10, SEQ ID NO:11, SEQ ID NO:12, SEQ ID NO:13, SEQ ID NO:14, SEQ ID NO:15, SEQ ID NO:16, SEQ ID NO:17, SEQ ID NO:18, SEQ ID NO:19, SEQ ID NO:20, SEQ ID NO:21, SEQ ID NO:22; SEQ ID NO:23, SEQ ID NO:24, SEQ ID NO:25, SEQ ID NO:26, SEQ ID NO:27, SEQ ID NO:28, SEQ ID NO:29, SEQ ID NO:30, SEQ ID NO:31, SEQ ID NO:32, SEQ ID NO:33, SEQ ID NO:34, SEQ ID NO:35, SEQ ID NO:36, SEQ ID NO:37, SEQ ID NO:38, SEQ ID NO:39, SEQ ID NO:40, SEQ ID NO:41, SEQ ID NO:42, SEQ ID NO:43, SEQ ID NO:44, SEQ ID NO:45, SEQ ID NO:46, SEQ ID NO:47, SEQ ID NO:48, SEQ ID NO:49, SEQ ID NO:50, SEQ ID NO:51, SEQ ID NO:52, SEQ ID NO:53, SEQ ID NO:54, SEQ ID NO:55, SEQ ID NO:56, SEQ ID NO:57, SEQ ID NO:58, SEQ ID NO:59, SEQ ID NO:60, SEQ ID NO:61, SEQ ID NO:62, SEQ ID NO:63, SEQ ID NO:64, SEQ ID NO:65, SEQ ID NO:66, SEQ ID NO:67, SEQ ID NO:68, SEQ ID NO:69, SEQ ID NO:70, SEQ ID NO:71, SEQ ID NO:72, SEQ ID NO:73, SEQ ID NO:74, SEQ ID NO:75, SEQ ID NO:76, SEQ ID NO:77, SEQ ID NO:78, SEQ ID NO:79, SEQ ID NO:80, SEQ ID NO:81, SEQ ID NO:82, SEQ ID NO:83, SEQ ID NO:84, SEQ ID NO:85, SEQ ID NO:86, SEQ ID NO:87, SEQ ID NO:88, SEQ ID NO:89, SEQ ID NO:90, SEQ ID NO:91, SEQ ID NO:92, SEQ ID NO:93, SEQ ID NO:94, SEQ ID NO:95, SEQ ID NO:96, SEQ ID NO:98, SEQ ID NO:99, SEQ ID NO:100, SEQ ID NO:101, SEQ ID NO:102, SEQ ID NO:103, SEQ ID NO:104, SEQ ID NO:105, SEQ ID NO:106, SEQ ID NO:108, SEQ ID NO:109, SEQ ID NO:131, SEQ ID NO:132, SEQ ID NO:133, SEQ ID NO:134, SEQ ID NO:135, SEQ ID NO:136, SEQ ID NO:137, SEQ ID NO:138, SEQ ID NO:139, SEQ ID NO:140, SEQ ID NO:141, SEQ ID NO:142, SEQ ID NO:143, SEQ ID NO:144, SEQ ID NO:145, SEQ ID NO:146, SEQ ID NO:147, SEQ ID NO:148, SEQ ID NO:149, SEQ ID NO:150, SEQ ID NO:151, SEQ ID NO:152, SEQ ID NO:153, SEQ ID NO:154, SEQ ID NO:155, SEQ ID NO:156, SEQ ID NO:157, SEQ ID NO:158, SEQ ID NO:159, SEQ ID NO:160, SEQ ID NO:161, SEQ ID NO:162, SEQ ID NO:163, SEQ ID NO:164, SEQ ID NO:165, SEQ ID NO:166, SEQ ID NO:167, SEQ ID NO:168, SEQ ID NO:169, SEQ ID NO:170, SEQ ID NO:171, SEQ ID NO:172, SEQ ID NO:173, SEQ ID NO:174, SEQ ID NO:175, SEQ ID NO:177, SEQ ID NO:178, SEQ ID NO:179, SEQ ID NO:180, SEQ ID NO:181, SEQ ID NO:182, SEQ ID NO:183, SEQ ID NO:184, SEQ ID NO:185, SEQ ID NO:186, SEQ ID NO:187, SEQ ID NO:188, SEQ ID NO:189, SEQ ID NO:190, SEQ ID NO:191, SEQ ID NO:192, SEQ ID NO:193, SEQ ID NO:194, SEQ ID NO:196, SEQ ID NO:197, SEQ ID NO:198, SEQ ID NO:199, SEQ ID NO:200, SEQ ID NO:201, SEQ ID NO:202, SEQ ID NO:203, SEQ ID NO:204, SEQ ID NO:205, SEQ ID NO:206, SEQ ID NO:207, SEQ ID NO:208, SEQ ID NO:209, SEQ ID NO:210, SEQ ID NO:211, SEQ ID NO:212, SEQ ID NO:213, SEQ ID NO:214, SEQ ID NO:215, SEQ ID NO:216, SEQ ID NO:217, SEQ ID NO:218, SEQ ID NO:219, SEQ ID NO:220, SEQ ID NO:221, SEQ ID NO:222, SEQ ID NO:223, SEQ ID NO:224, SEQ ID NO:225, SEQ ID NO:226, SEQ ID NO:227, SEQ ID NO:228, SEQ ID NO:229, SEQ ID NO:230, SEQ ID NO:231, SEQ ID NO:232, SEQ ID NO:233, SEQ ID NO:234, SEQ ID NO:235, and SEQ ID NO:236. A further embodiment of this aspect includes the NIN/NLP1 orthogroup protein being a NIN protein and having at least 70% sequence identity, at least 75% sequence identity, at least 80% sequence identity, at least 85% sequence identity, at least 90% sequence identity, at least 95% sequence identity, at least 96% sequence identity, at least 97% sequence identity, at least 98% sequence identity, or at least 99% sequence identity to an amino acid sequence selected from the group consisting of SEQ ID NO:22 (i.e., CsaNIN; Cannabis sativa), SEQ ID NO:78 (i.e., HluNIN; Humulus lupulus), SEQ ID NO:89 (i.e., LjNIN; Lotus japonicus), SEQ ID NO:108 (i.e., MtNIN; Medicago truncatula); SEQ ID NO:136 (i.e., PanNIN; Parasponia andersonii), SEQ ID NO:139 (i.e., PriNIN; Parasponia rigida), SEQ ID NO:142 (i.e., PruNIN; Parasponia rugosa), SEQ ID NO:185 (i.e., TleNIN; Trema levigata), SEQ ID NO:187 (i.e., TorNIN; Trema orientalis), SEQ ID NO:190 (i.e., TtoNIN; Trema tomentosa), and SEQ ID NO:236 (i.e., ZjuNIN; Ziziphus jujuba). Still another embodiment of this aspect includes the NIN/NLP1 orthogroup protein being a NIN protein and having at least 70% sequence identity, at least 75% sequence identity, at least 80% sequence identity, at least 85% sequence identity, at least 90% sequence identity, at least 95% sequence identity, at least 96% sequence identity, at least 97% sequence identity, at least 98% sequence identity, or at least 99% sequence identity to an amino acid sequence selected from the group of SEQ ID NO:89 (i.e., LjNIN; Lotus japonicus) or SEQ ID NO:108 (i.e., MtNIN; Medicago truncatula).

[0011] Yet another embodiment of this aspect that can be combined with any of the preceding embodiments that has a genetically altered plant includes the nucleic acid encoding a NLP2-3 orthogroup protein, a NLP4 orthogroup protein, or a basal NIN/NLP orthogroup protein. An additional embodiment of this aspect includes the NLP2-3 orthogroup protein having at least 70% sequence identity, at least 75% sequence identity, at least 80% sequence identity, at least 85% sequence identity, at least 90% sequence identity, at least 95% sequence identity, at least 96% sequence identity, at least 97% sequence identity, at least 98% sequence identity, or at least 99% sequence identity to an amino acid sequence selected from the group of SEQ ID NO:237, SEQ ID NO:238, SEQ ID NO:239, SEQ ID NO:241, SEQ ID NO:242, SEQ ID NO:243, SEQ ID NO:244, SEQ ID NO:245, SEQ ID NO:246, SEQ ID NO:247, SEQ ID NO:248, SEQ ID NO:250, SEQ ID NO:251, SEQ ID NO:252, SEQ ID NO:253, SEQ ID NO:254, SEQ ID NO:255, SEQ ID NO:256, SEQ ID NO:257, SEQ ID NO:258, SEQ ID NO:259, SEQ ID NO:260, SEQ ID NO:261, SEQ ID NO:262, SEQ ID NO:263, SEQ ID NO:264, SEQ ID NO:265, SEQ ID NO:266, SEQ ID NO:267, SEQ ID NO:268, SEQ ID NO:269, SEQ ID NO:270, SEQ ID NO:271, SEQ ID NO:273, SEQ ID NO:274, SEQ ID NO:275, SEQ ID NO:276, SEQ ID NO:277, SEQ ID NO:278, SEQ ID NO:279, SEQ ID NO:280, SEQ ID NO:281, SEQ ID NO:282, SEQ ID NO:283, SEQ ID NO:284, SEQ ID NO:285, SEQ ID NO:286, SEQ ID NO:287, SEQ ID NO:288, SEQ ID NO:289, SEQ ID NO:290, SEQ ID NO:291, SEQ ID NO:292, SEQ ID NO:293, SEQ ID NO:294, SEQ ID NO:295, SEQ ID NO:296, SEQ ID NO:297, SEQ ID NO:298, SEQ ID NO:299, SEQ ID NO:300, SEQ ID NO:301, SEQ ID NO:302, SEQ ID NO:303, SEQ ID NO:304, SEQ ID NO:305, SEQ ID NO:306, SEQ ID NO:307, SEQ ID NO:308, SEQ ID NO:309, SEQ ID NO:310, SEQ ID NO:311, SEQ ID NO:312, SEQ ID NO:313, SEQ ID NO:314, SEQ ID NO:315, SEQ ID NO:316, SEQ ID NO:317, SEQ ID NO:318, SEQ ID NO:319, SEQ ID NO:320, SEQ ID NO:321, SEQ ID NO:322, SEQ ID NO:323, SEQ ID NO:324, SEQ ID NO:325, SEQ ID NO:326, SEQ ID NO:327, SEQ ID NO:328, SEQ ID NO:329, SEQ ID NO:332, SEQ ID NO:333, SEQ ID NO:334, SEQ ID NO:335, SEQ ID NO:336, SEQ ID NO:337, SEQ ID NO:338, SEQ ID NO:339, SEQ ID NO:340, SEQ ID NO:341, SEQ ID NO:342, SEQ ID NO:343, SEQ ID NO:344, SEQ ID NO:345, SEQ ID NO:346, SEQ ID NO:347, SEQ ID NO:348, SEQ ID NO:349, SEQ ID NO:350, SEQ ID NO:351, SEQ ID NO:352, SEQ ID NO:353, SEQ ID NO:354, SEQ ID NO:355, SEQ ID NO:356, SEQ ID NO:357, SEQ ID NO:358, SEQ ID NO:359, SEQ ID NO:360, SEQ ID NO:361, SEQ ID NO:362, SEQ ID NO:363, SEQ ID NO:364, SEQ ID NO:365, SEQ ID NO:366, SEQ ID NO:367, SEQ ID NO:368, SEQ ID NO:369, SEQ ID NO:371, SEQ ID NO:372, SEQ ID NO:373, SEQ ID NO:374, SEQ ID NO:375, SEQ ID NO:376, and SEQ ID NO:377. Yet another embodiment of this aspect includes the NLP4 orthogroup protein having at least 70% sequence identity, at least 75% sequence identity, at least 80% sequence identity, at least 85% sequence identity, at least 90% sequence identity, at least 95% sequence identity, at least 96% sequence identity, at least 97% sequence identity, at least 98% sequence identity, or at least 99% sequence identity to an amino acid sequence selected from the group of SEQ ID NO:378, SEQ ID NO:379, SEQ ID NO:380, SEQ ID NO:381, SEQ ID NO:382, SEQ ID NO:383, SEQ ID NO:384, SEQ ID NO:385, SEQ ID NO:386, SEQ ID NO:387, SEQ ID NO:388, SEQ ID NO:389, SEQ ID NO:390, SEQ ID NO:391, SEQ ID NO:392, SEQ ID NO:393, SEQ ID NO:394, SEQ ID NO:395, SEQ ID NO:396, SEQ ID NO:397, SEQ ID NO:398, SEQ ID NO:399, SEQ ID NO:400, SEQ ID NO:401, SEQ ID NO:402, SEQ ID NO:403, SEQ ID NO:404, SEQ ID NO:405, SEQ ID NO:406, SEQ ID NO:408, SEQ ID NO:409, SEQ ID NO:410, SEQ ID NO:411, SEQ ID NO:412, SEQ ID NO:413, SEQ ID NO:414, SEQ ID NO:415, SEQ ID NO:417, SEQ ID NO:418, SEQ ID NO:419, SEQ ID NO:420, SEQ ID NO:421, SEQ ID NO:422, SEQ ID NO:423, SEQ ID NO:424, SEQ ID NO:425, SEQ ID NO:426, SEQ ID NO:427, SEQ ID NO:428, SEQ ID NO:429, SEQ ID NO:430, SEQ ID NO:431, SEQ ID NO:432, SEQ ID NO:433, SEQ ID NO:434, SEQ ID NO:435, SEQ ID NO:436, SEQ ID NO:437, SEQ ID NO:438, SEQ ID NO:439, SEQ ID NO:440, SEQ ID NO:441, SEQ ID NO:442, SEQ ID NO:443, SEQ ID NO:444, SEQ ID NO:445, SEQ ID NO:446, SEQ ID NO:447, SEQ ID NO:448, SEQ ID NO:449, SEQ ID NO:450, SEQ ID NO:451, SEQ ID NO:452, SEQ ID NO:453, SEQ ID NO:455, SEQ ID NO:456, SEQ ID NO:457, SEQ ID NO:458, SEQ ID NO:459, SEQ ID NO:460, SEQ ID NO:461, SEQ ID NO:462, SEQ ID NO:463, SEQ ID NO:464, SEQ ID NO:465, SEQ ID NO:466, SEQ ID NO:467, SEQ ID NO:468, SEQ ID NO:469, SEQ ID NO:470, SEQ ID NO:471, SEQ ID NO:472, SEQ ID NO:473, SEQ ID NO:474, SEQ ID NO:475, SEQ ID NO:476, SEQ ID NO:477, SEQ ID NO:478, SEQ ID NO:479, SEQ ID NO:480, SEQ ID NO:481, SEQ ID NO:482, SEQ ID NO:483, SEQ ID NO:484, SEQ ID NO:485, SEQ ID NO:486, SEQ ID NO:487, SEQ ID NO:488, SEQ ID NO:489, SEQ ID NO:490, SEQ ID NO:491, SEQ ID NO:492, SEQ ID NO:493, SEQ ID NO:494, SEQ ID NO:495, SEQ ID NO:496, SEQ ID NO:497, SEQ ID NO:498, SEQ ID NO:499, SEQ ID NO:500, SEQ ID NO:501, SEQ ID NO:502, SEQ ID NO:504, SEQ ID NO:505, SEQ ID NO:506, SEQ ID NO:507, SEQ ID NO:508, SEQ ID NO:509, SEQ ID NO:510, SEQ ID NO:511, SEQ ID NO:512, SEQ ID NO:513, SEQ ID NO:514, SEQ ID NO:515, SEQ ID NO:516, SEQ ID NO:517, SEQ ID NO:518, SEQ ID NO:519, SEQ ID NO:520, SEQ ID NO:521, SEQ ID NO:522, SEQ ID NO:523, and SEQ ID NO: 524. A further embodiment of this aspect includes the basal NIN/NLP orthogroup protein having at least 70% sequence identity, at least 75% sequence identity, at least 80% sequence identity, at least 85% sequence identity, at least 90% sequence identity, at least 95% sequence identity, at least 96% sequence identity, at least 97% sequence identity, at least 98% sequence identity, or at least 99% sequence identity to an amino acid sequence selected from the group of SEQ ID NO:637, SEQ ID NO:638, SEQ ID NO:639, SEQ ID NO:640, SEQ ID NO:641, SEQ ID NO:642, SEQ ID NO:643, SEQ ID NO:644, SEQ ID NO:645, SEQ ID NO:646, SEQ ID NO:647, SEQ ID NO:648, SEQ ID NO:649, SEQ ID NO:650, SEQ ID NO:651, SEQ ID NO:652, SEQ ID NO:653, SEQ ID NO:654, SEQ ID NO:655, SEQ ID NO:656, SEQ ID NO:657, SEQ ID NO:658, SEQ ID NO:659, SEQ ID NO:660, SEQ ID NO:661, or SEQ ID NO:662.

[0012] In yet another embodiment, which may be combined with any of the preceding embodiments, the nucleic acid encoding the NIN protein or the NLP protein is endogenous. Still another embodiment of this aspect that can be combined with any of the preceding embodiments includes the nucleic acid encoding the NIN protein or the NLP protein being heterologous. Yet another embodiment of this present aspect that can be combined with any of the preceding aspects that has the nucleic acid encoding the NIN protein or the NLP protein operably linked to a promoter includes the promoter being endogenous. Still another embodiment of this aspect that can be combined with any of the preceding aspects that has the nucleic acid encoding the NIN protein or the NLP protein operably linked to a promoter includes the promoter being heterologous.

[0013] In still another embodiment, which may be combined with any of the preceding embodiments, cytokinin signaling or induction of the cytokinin signaling pathway in a root pericycle cell layer, a root endodermis cell layer (i.e., endodermal cell layer), root cortex cell layers (i.e., cortical cell layer), and/or a root epidermis cell layer (i.e., epidermal cell layer) induces nodule organogenesis. Still another embodiment of this aspect that can be combined with any of the preceding embodiments further includes one or more CYCLOPS response elements operably linked to the nucleic acid. An additional embodiment of this aspect includes CYCLOPS expression in a root epidermis cell layer (i.e., epidermal cell layer) inducing rhizobium infection.

[0014] In a further embodiment, which may be combined with any of the preceding embodiments, the genetically altered plant is a monocot. An additional embodiment of this aspect includes the genetically altered plant being selected from the group of corn, rice, wheat, barley, sorghum, millet, oat, or rye. Still another embodiment of this aspect that can be combined with any of the preceding embodiments further includes the genetically altered plant being selected from the group of apple, pear, plum, apricot, peach, almond, walnut, cherry, strawberry, raspberry, blackberry, red currant, black currant, melon, cucumber, pumpkin, squash, grape, hemp, hops, birch, beech, jujube, cassava, poplar, chestnut, citrus, potato, tomato, sweet potato, Trema spp., and Jatropha spp. In yet another embodiment, which may be combined with any of the preceding embodiments, the WT plant is not a legume, does not form nodules for symbiosis with nitrogen fixing bacteria, or both is not a legume and does not form nodules for symbiosis with nitrogen fixing bacteria.

[0015] Still another embodiment of this aspect that can be combined with any of the preceding embodiments includes a genetically altered plant part of the genetically altered plant of any one of the preceding embodiments with respect to plant parts, wherein the plant part is a leaf, a stem, a root, a tuber, a flower, a seed, a kernel, a grain, a fruit, a cell, or a portion thereof and the genetically altered plant part includes the one or more genetic alterations. An additional embodiment of this aspect includes the plant part being a fruit, a tuber, a kernel, or a grain. Yet another embodiment of this aspect that can be combined with any of the preceding embodiments with respect to pollen grain or ovules includes a genetically altered pollen grain or a genetically altered ovule of the plant of any one of the preceding embodiments, wherein the genetically altered pollen grain or the genetically altered ovule includes the one or more genetic alterations. A further embodiment of this aspect that can be combined with any of the preceding embodiments includes a genetically altered protoplast produced from the genetically altered plant of any of the preceding embodiments, wherein the genetically altered protoplast includes the one or more genetic alterations. An additional embodiment of this aspect that can be combined with any of the preceding embodiments includes a genetically altered tissue culture produced from protoplasts or cells from the genetically altered plant of any one of the preceding embodiments, wherein the cells or protoplasts are produced from a plant part selected from the group of leaf, leaf mesophyll cell, anther, pistil, stem, petiole, root, root tip, tuber, fruit, seed, kernel, grain, flower, cotyledon, hypocotyl, embryo, or meristematic cell, wherein the genetically altered tissue culture includes the one or more genetic alterations. An additional embodiment of this aspect includes a genetically altered plant regenerated from the genetically altered tissue culture that includes the one or more genetic alterations. Still another embodiment of this aspect that can be combined with any of the preceding embodiments that has a genetically altered plant includes the genetically altered plant having all the physiological and morphological characteristics of the plant of any of the preceding embodiments. Yet another embodiment of this aspect that can be combined with any of the preceding embodiments that has a genetically altered plant includes a genetically altered plant seed produced from the genetically altered plant of any one of the preceding embodiments. A further embodiment of this aspect that can be combined with any of the preceding embodiments that has a genetically altered plant includes the seed of the plant producing a plant having all the physiological and morphological characteristics of the plant of any of the above embodiments.

[0016] An additional aspect of the disclosure includes methods of producing the genetically altered plant of any of the preceding embodiments that has a genetically altered plant, including the steps of: (a) introducing the one or more genetic alterations into a plant cell, tissue, or other explant; (b) regenerating the plant cell, tissue, or other explant into a genetically altered plantlet; and (c) growing the genetically altered plantlet into a genetically altered plant with the one or more genetic alterations that increase activity of the NIN protein or the NLP protein in response to cytokinin signaling as compared to an untransformed WT plant. An additional embodiment of this aspect further includes identifying successful introduction of the one or more genetic alterations by screening or selecting the plant cell, tissue, or other explant prior to step (b); screening or selecting plantlets between step (b) and (c); or screening or selecting plants after step (c). In yet another embodiment, which may be combined with any of the preceding embodiments, transformation is done using a transformation method selected from the group of particle bombardment (i.e., biolistics, gene gun), Agrobacterium-mediated transformation, Rhizobium-mediated transformation, or protoplast transfection or transformation.

[0017] Still another embodiment of this aspect that can be combined with any of the preceding embodiments includes genetic alterations being introduced with a vector. An additional embodiment of this aspect includes the vector including a promoter operably linked to a nucleotide encoding a NIN or NLP protein and one or more cytokinin response elements operably linked to the promoter. Yet another embodiment of this aspect includes the promoter and the one or more cytokinin response elements being selected from the group of a NIN gene promoter comprising a 5′-upstream sequence comprising a CYCLOPS-binding box through a transcription start site of the NIN gene operably linked to a 3C region, the NIN gene promoter comprising a 5′-upstream sequence comprising the CYCLOPS-binding box through to the transcription start site of the NIN gene operably linked to a CE region, a minimal promoter operably linked to a CYCLOPS-binding box operably linked to a CE region, and a minimal promoter operably linked to a CYCLOPS-binding box operably linked to one or more cytokinin response elements. In a further embodiment of this aspect, the vector includes one or more gene editing components that target a nuclear genome sequence operably linked to an endogenous NIN protein or NLP protein. Yet another embodiment of this aspect includes the nuclear genome sequence being edited by the one or more gene editing components to introduce a cis-regulatory element selected from the group of one or more cytokinin response elements, a 3C region, or a CE region. Yet another embodiment of this present aspect that can be combined with any of the preceding aspects that has a vector including one or more gene editing components includes one or more gene editing components being selected from the group of a ribonucleoprotein complex that targets the nuclear genome sequence; a vector including a TALEN protein encoding sequence, wherein the TALEN protein targets the nuclear genome sequence; a vector including a ZFN protein encoding sequence, wherein the ZFN protein targets the nuclear genome sequence; an oligonucleotide donor (ODN), wherein the ODN targets the nuclear genome sequence; or a vector including a CRISPR/Cas enzyme encoding sequence and a targeting sequence, wherein the targeting sequence targets the nuclear genome sequence.

[0018] A further embodiment of this present aspect that can be combined with any of the preceding aspects that has genetic alterations being introduced with a vector includes the NIN gene promoter, 3C region, CE region, CYCLOPS-binding box, or one or more cytokinin response elements being from a nodulating legume species. An additional embodiment of this aspect includes the nodulating legume species being selected from the group of peanut, pigeon pea, chickpea, soybean, velvet bean, bean, pea, adzuki bean, mung bean, clover, lupine, Lotus japonicus, and Medicago truncatula. Yet another embodiment of this present aspect that can be combined with any of the preceding aspects that has genetic alterations being introduced with a vector wherein the vector includes the NIN gene promoter, 3C region, CE region, CYCLOPS-binding box, or one or more cytokinin response elements from a nodulating legume species includes cytokinin response elements being selected from the group of SEQ ID NO:551, SEQ ID NO:552, SEQ ID NO:553, SEQ ID NO:554, SEQ ID NO:555, SEQ ID NO:556, SEQ ID NO:557, SEQ ID NO:558, SEQ ID NO:559, SEQ ID NO:560, SEQ ID NO:561, SEQ ID NO:562, SEQ ID NO:563, SEQ ID NO:564, SEQ ID NO:565, SEQ ID NO:566, SEQ ID NO:567, SEQ ID NO:568, SEQ ID NO:569, SEQ ID NO:570, SEQ ID NO:571, SEQ ID NO:572, SEQ ID NO:573, SEQ ID NO:574, SEQ ID NO:575, SEQ ID NO:576, SEQ ID NO:577, SEQ ID NO:578, SEQ ID NO:579, SEQ ID NO:580, SEQ ID NO:581, SEQ ID NO:582, SEQ ID NO:583, SEQ ID NO:584, SEQ ID NO:585, SEQ ID NO:586, SEQ ID NO:587, SEQ ID NO:588, SEQ ID NO:589, SEQ ID NO:590, SEQ ID NO:591, SEQ ID NO:592, SEQ ID NO:593, SEQ ID NO:594, SEQ ID NO:595, SEQ ID NO:596, SEQ ID NO:597, SEQ ID NO:598, SEQ ID NO:599, SEQ ID NO:600, SEQ ID NO:601, SEQ ID NO:602, SEQ ID NO:603, SEQ ID NO:604, SEQ ID NO:605, SEQ ID NO:606, SEQ ID NO:607, SEQ ID NO:608, SEQ ID NO:609, SEQ ID NO:610, SEQ ID NO:611, or SEQ ID NO:612. Still another embodiment of this present aspect that can be combined with any of the preceding aspects that has genetic alterations being introduced with a vector includes cytokinin response elements being selected from the group of SEQ ID NO:613, SEQ ID NO:614, SEQ ID NO:615, SEQ ID NO:616, SEQ ID NO:617, SEQ ID NO:618, SEQ ID NO:619, SEQ ID NO:620, SEQ ID NO:621, SEQ ID NO:622, SEQ ID NO:623, SEQ ID NO:624, SEQ ID NO:625, and SEQ ID NO:626.

[0019] A further embodiment of this present aspect that can be combined with any of the preceding aspects that has genetic alterations being introduced with a vector includes the NIN or NLP protein being a NIN/NLP1 orthogroup protein and having at least 70% sequence identity, at least 75% sequence identity, at least 80% sequence identity, at least 85% sequence identity, at least 90% sequence identity, at least 95% sequence identity, at least 96% sequence identity, at least 97% sequence identity, at least 98% sequence identity, or at least 99% sequence identity to an amino acid sequence selected from the group of SEQ ID NO:1, SEQ ID NO:2, SEQ ID NO:3, SEQ ID NO:4, SEQ ID NO:5, SEQ ID NO:6, SEQ ID NO:8, SEQ ID NO:9, SEQ ID NO:10, SEQ ID NO:11, SEQ ID NO:12, SEQ ID NO:13, SEQ ID NO:14, SEQ ID NO:15, SEQ ID NO:16, SEQ ID NO:17, SEQ ID NO:18, SEQ ID NO:19, SEQ ID NO:20, SEQ ID NO:21, SEQ ID NO:22; SEQ ID NO:23, SEQ ID NO:24, SEQ ID NO:25, SEQ ID NO:26, SEQ ID NO:27, SEQ ID NO:28, SEQ ID NO:29, SEQ ID NO:30, SEQ ID NO:31, SEQ ID NO:32, SEQ ID NO:33, SEQ ID NO:34, SEQ ID NO:35, SEQ ID NO:36, SEQ ID NO:37, SEQ ID NO:38, SEQ ID NO:39, SEQ ID NO:40, SEQ ID NO:41, SEQ ID NO:42, SEQ ID NO:43, SEQ ID NO:44, SEQ ID NO:45, SEQ ID NO:46, SEQ ID NO:47, SEQ ID NO:48, SEQ ID NO:49, SEQ ID NO:50, SEQ ID NO:51, SEQ ID NO:52, SEQ ID NO:53, SEQ ID NO:54, SEQ ID NO:55, SEQ ID NO:56, SEQ ID NO:57, SEQ ID NO:58, SEQ ID NO:59, SEQ ID NO:60, SEQ ID NO:61, SEQ ID NO:62, SEQ ID NO:63, SEQ ID NO:64, SEQ ID NO:65, SEQ ID NO:66, SEQ ID NO:67, SEQ ID NO:68, SEQ ID NO:69, SEQ ID NO:70, SEQ ID NO:71, SEQ ID NO:72, SEQ ID NO:73, SEQ ID NO:74, SEQ ID NO:75, SEQ ID NO:76, SEQ ID NO:77, SEQ ID NO:78, SEQ ID NO:79, SEQ ID NO:80, SEQ ID NO:81, SEQ ID NO:82, SEQ ID NO:83, SEQ ID NO:84, SEQ ID NO:85, SEQ ID NO:86, SEQ ID NO:87, SEQ ID NO:88, SEQ ID NO:89, SEQ ID NO:90, SEQ ID NO:91, SEQ ID NO:92, SEQ ID NO:93, SEQ ID NO:94, SEQ ID NO:95, SEQ ID NO:96, SEQ ID NO:98, SEQ ID NO:99, SEQ ID NO:100, SEQ ID NO:101, SEQ ID NO:102, SEQ ID NO:103, SEQ ID NO:104, SEQ ID NO:105, SEQ ID NO:106, SEQ ID NO:108, SEQ ID NO:109, SEQ ID NO:131, SEQ ID NO:132, SEQ ID NO:133, SEQ ID NO:134, SEQ ID NO:135, SEQ ID NO:136, SEQ ID NO:137, SEQ ID NO:138, SEQ ID NO:139, SEQ ID NO:140, SEQ ID NO:141, SEQ ID NO:142, SEQ ID NO:143, SEQ ID NO:144, SEQ ID NO:145, SEQ ID NO:146, SEQ ID NO:147, SEQ ID NO:148, SEQ ID NO:149, SEQ ID NO:150, SEQ ID NO:151, SEQ ID NO:152, SEQ ID NO:153, SEQ ID NO:154, SEQ ID NO:155, SEQ ID NO:156, SEQ ID NO:157, SEQ ID NO:158, SEQ ID NO:159, SEQ ID NO:160, SEQ ID NO:161, SEQ ID NO:162, SEQ ID NO:163, SEQ ID NO:164, SEQ ID NO:165, SEQ ID NO:166, SEQ ID NO:167, SEQ ID NO:168, SEQ ID NO:169, SEQ ID NO:170, SEQ ID NO:171, SEQ ID NO:172, SEQ ID NO:173, SEQ ID NO:174, SEQ ID NO:175, SEQ ID NO:177, SEQ ID NO:178, SEQ ID NO:179, SEQ ID NO:180, SEQ ID NO:181, SEQ ID NO:182, SEQ ID NO:183, SEQ ID NO:184, SEQ ID NO:185, SEQ ID NO:186, SEQ ID NO:187, SEQ ID NO:188, SEQ ID NO:189, SEQ ID NO:190, SEQ ID NO:191, SEQ ID NO:192, SEQ ID NO:193, SEQ ID NO:194, SEQ ID NO:196, SEQ ID NO:197, SEQ ID NO:198, SEQ ID NO:199, SEQ ID NO:200, SEQ ID NO:201, SEQ ID NO:202, SEQ ID NO:203, SEQ ID NO:204, SEQ ID NO:205, SEQ ID NO:206, SEQ ID NO:207, SEQ ID NO:208, SEQ ID NO:209, SEQ ID NO:210, SEQ ID NO:211, SEQ ID NO:212, SEQ ID NO:213, SEQ ID NO:214, SEQ ID NO:215, SEQ ID NO:216, SEQ ID NO:217, SEQ ID NO:218, SEQ ID NO:219, SEQ ID NO:220, SEQ ID NO:221, SEQ ID NO:222, SEQ ID NO:223, SEQ ID NO:224, SEQ ID NO:225, SEQ ID NO:226, SEQ ID NO:227, SEQ ID NO:228, SEQ ID NO:229, SEQ ID NO:230, SEQ ID NO:231, SEQ ID NO:232, SEQ ID NO:233, SEQ ID NO:234, SEQ ID NO:235, and SEQ ID NO:236. Yet another embodiment of this present aspect that can be combined with any of the preceding aspects that has genetic alterations being introduced with a vector includes the NIN/NLP1 orthogroup protein being a NIN protein and having at least 70% sequence identity, at least 75% sequence identity, at least 80% sequence identity, at least 85% sequence identity, at least 90% sequence identity, at least 95% sequence identity, at least 96% sequence identity, at least 97% sequence identity, at least 98% sequence identity, or at least 99% sequence identity to an amino acid sequence selected from the group SEQ ID NO:22 (i.e., CsaNIN; Cannabis sativa), SEQ ID NO:78 (i.e., HluNIN; Humulus lupulus), SEQ ID NO:89 (i.e., LjNIN; Lotus japonicus), SEQ ID NO:108 (i.e., MtNIN; Medicago truncatula); SEQ ID NO:136 (i.e., PanNIN; Parasponia andersonii), SEQ ID NO:139 (i.e., PriNIN; Parasponia rigida), SEQ ID NO:142 (i.e., PruNIN; Parasponia rugosa), SEQ ID NO:185 (i.e., TleNIN; Trema levigata), SEQ ID NO:187 (i.e., TorNIN; Trema orientalis), SEQ ID NO:190 (i.e., TtoNIN; Trema tomentosa), and SEQ ID NO:236 (i.e., ZjuNIN; Ziziphus jujuba). A further embodiment of this present aspect that can be combined with any of the preceding aspects that has genetic alterations being introduced with a vector includes the NIN/NLP1 orthogroup protein being a NIN protein and having at least 70% sequence identity, at least 75% sequence identity, at least 80% sequence identity, at least 85% sequence identity, at least 90% sequence identity, at least 95% sequence identity, at least 96% sequence identity, at least 97% sequence identity, at least 98% sequence identity, or at least 99% sequence identity to an amino acid sequence selected from the group SEQ ID NO:89 (i.e., LjNIN; Lotus japonicus) or SEQ ID NO:108 (i.e., MtNIN; Medicago truncatula). Still another embodiment of this present aspect that can be combined with any of the preceding aspects that has genetic alterations being introduced with a vector includes the NIN or NLP protein being a NLP2-3 orthogroup protein and having at least 70% sequence identity, at least 75% sequence identity, at least 80% sequence identity, at least 85% sequence identity, at least 90% sequence identity, at least 95% sequence identity, at least 96% sequence identity, at least 97% sequence identity, at least 98% sequence identity, or at least 99% sequence identity to an amino acid sequence selected from the group of SEQ ID NO:237, SEQ ID NO:238, SEQ ID NO:239, SEQ ID NO:241, SEQ ID NO:242, SEQ ID NO:243, SEQ ID NO:244, SEQ ID NO:245, SEQ ID NO:246, SEQ ID NO:247, SEQ ID NO:248, SEQ ID NO:250, SEQ ID NO:251, SEQ ID NO:252, SEQ ID NO:253, SEQ ID NO:254, SEQ ID NO:255, SEQ ID NO:256, SEQ ID NO:257, SEQ ID NO:258, SEQ ID NO:259, SEQ ID NO:260, SEQ ID NO:261, SEQ ID NO:262, SEQ ID NO:263, SEQ ID NO:264, SEQ ID NO:265, SEQ ID NO:266, SEQ ID NO:267, SEQ ID NO:268, SEQ ID NO:269, SEQ ID NO:270, SEQ ID NO:271, SEQ ID NO:273, SEQ ID NO:274, SEQ ID NO:275, SEQ ID NO:276, SEQ ID NO:277, SEQ ID NO:278, SEQ ID NO:279, SEQ ID NO:280, SEQ ID NO:281, SEQ ID NO:282, SEQ ID NO:283, SEQ ID NO:284, SEQ ID NO:285, SEQ ID NO:286, SEQ ID NO:287, SEQ ID NO:288, SEQ ID NO:289, SEQ ID NO:290, SEQ ID NO:291, SEQ ID NO:292, SEQ ID NO:293, SEQ ID NO:294, SEQ ID NO:295, SEQ ID NO:296, SEQ ID NO:297, SEQ ID NO:298, SEQ ID NO:299, SEQ ID NO:300, SEQ ID NO:301, SEQ ID NO:302, SEQ ID NO:303, SEQ ID NO:304, SEQ ID NO:305, SEQ ID NO:306, SEQ ID NO:307, SEQ ID NO:308, SEQ ID NO:309, SEQ ID NO:310, SEQ ID NO:311, SEQ ID NO:312, SEQ ID NO:313, SEQ ID NO:314, SEQ ID NO:315, SEQ ID NO:316, SEQ ID NO:317, SEQ ID NO:318, SEQ ID NO:319, SEQ ID NO:320, SEQ ID NO:321, SEQ ID NO:322, SEQ ID NO:323, SEQ ID NO:324, SEQ ID NO:325, SEQ ID NO:326, SEQ ID NO:327, SEQ ID NO:328, SEQ ID NO:329, SEQ ID NO:332, SEQ ID NO:333, SEQ ID NO:334, SEQ ID NO:335, SEQ ID NO:336, SEQ ID NO:337, SEQ ID NO:338, SEQ ID NO:339, SEQ ID NO:340, SEQ ID NO:341, SEQ ID NO:342, SEQ ID NO:343, SEQ ID NO:344, SEQ ID NO:345, SEQ ID NO:346, SEQ ID NO:347, SEQ ID NO:348, SEQ ID NO:349, SEQ ID NO:350, SEQ ID NO:351, SEQ ID NO:352, SEQ ID NO:353, SEQ ID NO:354, SEQ ID NO:355, SEQ ID NO:356, SEQ ID NO:357, SEQ ID NO:358, SEQ ID NO:359, SEQ ID NO:360, SEQ ID NO:361, SEQ ID NO:362, SEQ ID NO:363, SEQ ID NO:364, SEQ ID NO:365, SEQ ID NO:366, SEQ ID NO:367, SEQ ID NO:368, SEQ ID NO:369, SEQ ID NO:371, SEQ ID NO:372, SEQ ID NO:373, SEQ ID NO:374, SEQ ID NO:375, SEQ ID NO:376, and SEQ ID NO:377. A further embodiment of this present aspect that can be combined with any of the preceding aspects that has genetic alterations being introduced with a vector includes the NIN or NLP protein being a NLP4 orthogroup protein and having at least 70% sequence identity, at least 75% sequence identity, at least 80% sequence identity, at least 85% sequence identity, at least 90% sequence identity, at least 95% sequence identity, at least 96% sequence identity, at least 97% sequence identity, at least 98% sequence identity, or at least 99% sequence identity to an amino acid sequence selected from the group of SEQ ID NO:378, SEQ ID NO:379, SEQ ID NO:380, SEQ ID NO:381, SEQ ID NO:382, SEQ ID NO:383, SEQ ID NO:384, SEQ ID NO:385, SEQ ID NO:386, SEQ ID NO:387, SEQ ID NO:388, SEQ ID NO:389, SEQ ID NO:390, SEQ ID NO:391, SEQ ID NO:392, SEQ ID NO:393, SEQ ID NO:394, SEQ ID NO:395, SEQ ID NO:396, SEQ ID NO:397, SEQ ID NO:398, SEQ ID NO:399, SEQ ID NO:400, SEQ ID NO:401, SEQ ID NO:402, SEQ ID NO:403, SEQ ID NO:404, SEQ ID NO:405, SEQ ID NO:406, SEQ ID NO:408, SEQ ID NO:409, SEQ ID NO:410, SEQ ID NO:411, SEQ ID NO:412, SEQ ID NO:413, SEQ ID NO:414, SEQ ID NO:415, SEQ ID NO:417, SEQ ID NO:418, SEQ ID NO:419, SEQ ID NO:420, SEQ ID NO:421, SEQ ID NO:422, SEQ ID NO:423, SEQ ID NO:424, SEQ ID NO:425, SEQ ID NO:426, SEQ ID NO:427, SEQ ID NO:428, SEQ ID NO:429, SEQ ID NO:430, SEQ ID NO:431, SEQ ID NO:432, SEQ ID NO:433, SEQ ID NO:434, SEQ ID NO:435, SEQ ID NO:436, SEQ ID NO:437, SEQ ID NO:438, SEQ ID NO:439, SEQ ID NO:440, SEQ ID NO:441, SEQ ID NO:442, SEQ ID NO:443, SEQ ID NO:444, SEQ ID NO:445, SEQ ID NO:446, SEQ ID NO:447, SEQ ID NO:448, SEQ ID NO:449, SEQ ID NO:450, SEQ ID NO:451, SEQ ID NO:452, SEQ ID NO:453, SEQ ID NO:455, SEQ ID NO:456, SEQ ID NO:457, SEQ ID NO:458, SEQ ID NO:459, SEQ ID NO:460, SEQ ID NO:461, SEQ ID NO:462, SEQ ID NO:463, SEQ ID NO:464, SEQ ID NO:465, SEQ ID NO:466, SEQ ID NO:467, SEQ ID NO:468, SEQ ID NO:469, SEQ ID NO:470, SEQ ID NO:471, SEQ ID NO:472, SEQ ID NO:473, SEQ ID NO:474, SEQ ID NO:475, SEQ ID NO:476, SEQ ID NO:477, SEQ ID NO:478, SEQ ID NO:479, SEQ ID NO:480, SEQ ID NO:481, SEQ ID NO:482, SEQ ID NO:483, SEQ ID NO:484, SEQ ID NO:485, SEQ ID NO:486, SEQ ID NO:487, SEQ ID NO:488, SEQ ID NO:489, SEQ ID NO:490, SEQ ID NO:491, SEQ ID NO:492, SEQ ID NO:493, SEQ ID NO:494, SEQ ID NO:495, SEQ ID NO:496, SEQ ID NO:497, SEQ ID NO:498, SEQ ID NO:499, SEQ ID NO:500, SEQ ID NO:501, SEQ ID NO:502, SEQ ID NO:504, SEQ ID NO:505, SEQ ID NO:506, SEQ ID NO:507, SEQ ID NO:508, SEQ ID NO:509, SEQ ID NO:510, SEQ ID NO:511, SEQ ID NO:512, SEQ ID NO:513, SEQ ID NO:514, SEQ ID NO:515, SEQ ID NO:516, SEQ ID NO:517, SEQ ID NO:518, SEQ ID NO:519, SEQ ID NO:520, SEQ ID NO:521, SEQ ID NO:522, SEQ ID NO:523, and SEQ ID NO:524. An additional embodiment of this present aspect that can be combined with any of the preceding aspects that has genetic alterations being introduced with a vector includes the NIN or NLP protein being a basal NIN/NLP orthogroup protein and having at least 70% sequence identity, at least 75% sequence identity, at least 80% sequence identity, at least 85% sequence identity, at least 90% sequence identity, at least 95% sequence identity, at least 96% sequence identity, at least 97% sequence identity, at least 98% sequence identity, or at least 99% sequence identity to an amino acid sequence selected from the group consisting of SEQ ID NO:637, SEQ ID NO:638, SEQ ID NO:639, SEQ ID NO:640, SEQ ID NO:641, SEQ ID NO:642, SEQ ID NO:643, SEQ ID NO:644, SEQ ID NO:645, SEQ ID NO:646, SEQ ID NO:647, SEQ ID NO:648, SEQ ID NO:649, SEQ ID NO:650, SEQ ID NO:651, SEQ ID NO:652, SEQ ID NO:653, SEQ ID NO:654, SEQ ID NO:655, SEQ ID NO:656, SEQ ID NO:657, SEQ ID NO:658, SEQ ID NO:659, SEQ ID NO:660, SEQ ID NO:661, or SEQ ID NO:662.

[0020] A further aspect of the disclosure includes methods of cultivating the genetically altered plant of any of the preceding embodiments that has a genetically altered plant, including the steps of: planting a genetically altered seedling, a genetically altered plantlet, a genetically altered cutting, a genetically altered tuber, a genetically altered root, or a genetically altered seed in soil to produce the genetically altered plant or grafting the genetically altered seedling, the genetically altered plantlet, or the genetically altered cutting to a root stock or a second plant grown in soil to produce the genetically altered plant; cultivating the plant to produce harvestable seed, harvestable leaves, harvestable roots, harvestable cuttings, harvestable wood, harvestable fruit, harvestable kernels, harvestable tubers, and/or harvestable grain; and harvesting the harvestable seed, harvestable leaves, harvestable roots, harvestable cuttings, harvestable wood, harvestable fruit, harvestable kernels, harvestable tubers, and/or harvestable grain.

[0021] An aspect of the disclosure includes a genetically altered plant, wherein the plant or a part thereof includes one or more genetic alterations that increase activity of a NODULE INCEPTION (NIN) protein or a NIN-like protein (NLP protein) in response to cytokinin signaling as compared to a wild type (WT) plant without the one or more genetic alterations, and wherein the plant or the part thereof includes a nucleic acid encoding the NIN protein or the NLP protein. An additional embodiment of this aspect includes the one or more genetic alterations being addition of one or more, two or more, three or more, four or more, five or more, six or more, seven or more, eight or more, nine or more, ten or more, eleven or more, twelve or more, thirteen or more, fourteen or more, fifteen or more, sixteen or more, seventeen or more, eighteen or more, nineteen or more, twenty or more, twenty-one or more, twenty-two or more, twenty-three or more, or twenty-four or more cytokinin response elements operably linked to the nucleic acid encoding the NIN protein or the NLP protein. Yet another embodiment of this aspect includes at least one of the cytokinin response elements being a B-type cytokinin signaling RESPONSE REGULATOR (RR) binding site. A further embodiment of this aspect includes at least one of the B-type cytokinin signaling RR binding sites having the sequence of SEQ ID NO:613 or SEQ ID NO:614. Yet another embodiment of this aspect includes at least one of the B-type cytokinin signaling RR binding sites having the sequence of SEQ ID NO:679, SEQ ID NO:680, SEQ ID NO:681, SEQ ID NO:682, SEQ ID NO:683, SEQ ID NO:684, SEQ ID NO:685, or SEQ ID NO:686. Still another embodiment of this aspect includes at least one of the B-type cytokinin signaling RR binding sites having the sequence selected from the group of SEQ ID NO:551, SEQ ID NO:552, SEQ ID NO:553, SEQ ID NO:554, SEQ ID NO:555, SEQ ID NO:556, SEQ ID NO:557, SEQ ID NO:558, SEQ ID NO:559, SEQ ID NO:560, SEQ ID NO:561, SEQ ID NO:562, SEQ ID NO:563, SEQ ID NO:564, SEQ ID NO:565, SEQ ID NO:566, SEQ ID NO:567, SEQ ID NO:568, SEQ ID NO:569, SEQ ID NO:570, SEQ ID NO:571, SEQ ID NO:572, SEQ ID NO:573, SEQ ID NO:574, SEQ ID NO:575, SEQ ID NO:576, SEQ ID NO:577, SEQ ID NO:578, SEQ ID NO:579, SEQ ID NO:580, SEQ ID NO:581, SEQ ID NO:582, SEQ ID NO:583, SEQ ID NO:584, SEQ ID NO:585, SEQ ID NO:586, SEQ ID NO:587, SEQ ID NO:588, SEQ ID NO:589, SEQ ID NO:590, SEQ ID NO:591, SEQ ID NO:592, SEQ ID NO:593, SEQ ID NO:594, SEQ ID NO:595, SEQ ID NO:596, SEQ ID NO:597, SEQ ID NO:598, SEQ ID NO:599, SEQ ID NO:600, SEQ ID NO:601, SEQ ID NO:602, SEQ ID NO:603, SEQ ID NO:604, SEQ ID NO:605, SEQ ID NO:606, SEQ ID NO:607, SEQ ID NO:608, SEQ ID NO:609, SEQ ID NO:610, SEQ ID NO:611, SEQ ID NO:612, SEQ ID NO:615, SEQ ID NO:616, SEQ ID NO:617, SEQ ID NO:618, SEQ ID NO:619, SEQ ID NO:620, SEQ ID NO:621, SEQ ID NO:622, SEQ ID NO:623, SEQ ID NO:624, SEQ ID NO:625, SEQ ID NO:626, SEQ ID NO:679, SEQ ID NO:680, SEQ ID NO:681, SEQ ID NO:682, SEQ ID NO:683, SEQ ID NO:684, SEQ ID NO:685, or SEQ ID NO:686.

[0022] In yet another embodiment, which may be combined with any of the preceding embodiments, the cytokinin response elements are within 100 nucleotides, within 90 nucleotides, within 86 nucleotides, within 80 nucleotides, within 70 nucleotides, within 60 nucleotides, within 50 nucleotides, within 40 nucleotides, within 30 nucleotides, within 25 nucleotides, within 20 nucleotides, within 19 nucleotides, within 18 nucleotides, within 17 nucleotides, within 16 nucleotides, within 15 nucleotides, within 14 nucleotides, within 13 nucleotides, within 12 nucleotides, within 11 nucleotides, within 10 nucleotides, within 9 nucleotides, within 8 nucleotides, within 7 nucleotides, within 6 nucleotides, within 5 nucleotides, within 4 nucleotides, within 3 nucleotides, within 2 nucleotides, or within 1 nucleotide of each other. In an additional embodiment of this aspect, the cytokinin response elements are within 11 nucleotides of each other. In yet another embodiment, which may be combined with any of the preceding embodiments, the nucleic acid encoding the NIN protein or the NLP protein is operably linked to a promoter that is operably linked to the cytokinin response elements. In an additional embodiment of this aspect, the promoter and the cytokinin response elements are within 110,000 nucleotides, within 105,000 nucleotides, within 100,000 nucleotides, within 95,000 nucleotides, within 90,000 nucleotides, within 85,000 nucleotides, within 80,000 nucleotides, within 75,000 nucleotides, within 70,000 nucleotides, within 65,000 nucleotides, within 60,000 nucleotides, within 55,000 nucleotides, within 50,000 nucleotides, within 45,000 nucleotides, within 42,000 nucleotides, within 40,000 nucleotides, within 35,000 nucleotides, within 30,000 nucleotides, within 25,000 nucleotides, within 20,000 nucleotides, within 15,000 nucleotides, within 10,000 nucleotides, within 9,000 nucleotides, within 8,000 nucleotides, within 7,000 nucleotides, within 6,000 nucleotides, within 5,000 nucleotides, within 4,000 nucleotides, within 3,000 nucleotides, within 2,000 nucleotides, within 1,000 nucleotides, within 500 nucleotides, within 400 nucleotides, within 300 nucleotides, within 200 nucleotides, or within 100 nucleotides of each other.

[0023] Still another embodiment of this aspect that can be combined with any of the preceding embodiments includes the nucleic acid encoding a NIN/NLP1 orthogroup protein. An additional embodiment of this aspect includes the NIN/NLP1 orthogroup protein having at least 70% sequence identity, at least 75% sequence identity, at least 80% sequence identity, at least 85% sequence identity, at least 90% sequence identity, at least 95% sequence identity, at least 96% sequence identity, at least 97% sequence identity, at least 98% sequence identity, or at least 99% sequence identity to an amino acid sequence selected from the group of SEQ ID NO:1, SEQ ID NO:2, SEQ ID NO:3, SEQ ID NO:4, SEQ ID NO:5, SEQ ID NO:6, SEQ ID NO:8, SEQ ID NO:9, SEQ ID NO:10, SEQ ID NO:11, SEQ ID NO:12, SEQ ID NO:13, SEQ ID NO:14, SEQ ID NO:15, SEQ ID NO:16, SEQ ID NO:17, SEQ ID NO:18, SEQ ID NO:19, SEQ ID NO:20, SEQ ID NO:21, SEQ ID NO:22; SEQ ID NO:23, SEQ ID NO:24, SEQ ID NO:25, SEQ ID NO:26, SEQ ID NO:27, SEQ ID NO:28, SEQ ID NO:29, SEQ ID NO:30, SEQ ID NO:31, SEQ ID NO:32, SEQ ID NO:33, SEQ ID NO:34, SEQ ID NO:35, SEQ ID NO:36, SEQ ID NO:37, SEQ ID NO:38, SEQ ID NO:39, SEQ ID NO:40, SEQ ID NO:41, SEQ ID NO:42, SEQ ID NO:43, SEQ ID NO:44, SEQ ID NO:45, SEQ ID NO:46, SEQ ID NO:47, SEQ ID NO:48, SEQ ID NO:49, SEQ ID NO:50, SEQ ID NO:51, SEQ ID NO:52, SEQ ID NO:53, SEQ ID NO:54, SEQ ID NO:55, SEQ ID NO:56, SEQ ID NO:57, SEQ ID NO:58, SEQ ID NO:59, SEQ ID NO:60, SEQ ID NO:61, SEQ ID NO:62, SEQ ID NO:63, SEQ ID NO:64, SEQ ID NO:65, SEQ ID NO:66, SEQ ID NO:67, SEQ ID NO:68, SEQ ID NO:69, SEQ ID NO:70, SEQ ID NO:71, SEQ ID NO:72, SEQ ID NO:73, SEQ ID NO:74, SEQ ID NO:75, SEQ ID NO:76, SEQ ID NO:77, SEQ ID NO:78, SEQ ID NO:79, SEQ ID NO:80, SEQ ID NO:81, SEQ ID NO:82, SEQ ID NO:83, SEQ ID NO:84, SEQ ID NO:85, SEQ ID NO:86, SEQ ID NO:87, SEQ ID NO:88, SEQ ID NO:89, SEQ ID NO:90, SEQ ID NO:91, SEQ ID NO:92, SEQ ID NO:93, SEQ ID NO:94, SEQ ID NO:95, SEQ ID NO:96, SEQ ID NO:98, SEQ ID NO:99, SEQ ID NO:100, SEQ ID NO:101, SEQ ID NO:102, SEQ ID NO:103, SEQ ID NO:104, SEQ ID NO:105, SEQ ID NO:106, SEQ ID NO:108, SEQ ID NO:109, SEQ ID NO:131, SEQ ID NO:132, SEQ ID NO:133, SEQ ID NO:134, SEQ ID NO:135, SEQ ID NO:136, SEQ ID NO:137, SEQ ID NO:138, SEQ ID NO:139, SEQ ID NO:140, SEQ ID NO:141, SEQ ID NO:142, SEQ ID NO:143, SEQ ID NO:144, SEQ ID NO:145, SEQ ID NO:146, SEQ ID NO:147, SEQ ID NO:148, SEQ ID NO:149, SEQ ID NO:150, SEQ ID NO:151, SEQ ID NO:152, SEQ ID NO:153, SEQ ID NO:154, SEQ ID NO:155, SEQ ID NO:156, SEQ ID NO:157, SEQ ID NO:158, SEQ ID NO:159, SEQ ID NO:160, SEQ ID NO:161, SEQ ID NO:162, SEQ ID NO:163, SEQ ID NO:164, SEQ ID NO:165, SEQ ID NO:166, SEQ ID NO:167, SEQ ID NO:168, SEQ ID NO:169, SEQ ID NO:170, SEQ ID NO:171, SEQ ID NO:172, SEQ ID NO:173, SEQ ID NO:174, SEQ ID NO:175, SEQ ID NO:177, SEQ ID NO:178, SEQ ID NO:179, SEQ ID NO:180, SEQ ID NO:181, SEQ ID NO:182, SEQ ID NO:183, SEQ ID NO:184, SEQ ID NO:185, SEQ ID NO:186, SEQ ID NO:187, SEQ ID NO:188, SEQ ID NO:189, SEQ ID NO:190, SEQ ID NO:191, SEQ ID NO:192, SEQ ID NO:193, SEQ ID NO:194, SEQ ID NO:196, SEQ ID NO:197, SEQ ID NO:198, SEQ ID NO:199, SEQ ID NO:200, SEQ ID NO:201, SEQ ID NO:202, SEQ ID NO:203, SEQ ID NO:204, SEQ ID NO:205, SEQ ID NO:206, SEQ ID NO:207, SEQ ID NO:208, SEQ ID NO:209, SEQ ID NO:210, SEQ ID NO:211, SEQ ID NO:212, SEQ ID NO:213, SEQ ID NO:214, SEQ ID NO:215, SEQ ID NO:216, SEQ ID NO:217, SEQ ID NO:218, SEQ ID NO:219, SEQ ID NO:220, SEQ ID NO:221, SEQ ID NO:222, SEQ ID NO:223, SEQ ID NO:224, SEQ ID NO:225, SEQ ID NO:226, SEQ ID NO:227, SEQ ID NO:228, SEQ ID NO:229, SEQ ID NO:230, SEQ ID NO:231, SEQ ID NO:232, SEQ ID NO:233, SEQ ID NO:234, SEQ ID NO:235, SEQ ID NO:236, SEQ ID NO:687, SEQ ID NO:688, SEQ ID NO:689, SEQ ID NO:690, SEQ ID NO:691, SEQ ID NO:692, or SEQ ID NO:693. A further embodiment of this aspect includes the NIN/NLP1 orthogroup protein being a NIN protein and having at least 70% sequence identity, at least 75% sequence identity, at least 80% sequence identity, at least 85% sequence identity, at least 90% sequence identity, at least 95% sequence identity, at least 96% sequence identity, at least 97% sequence identity, at least 98% sequence identity, or at least 99% sequence identity to an amino acid sequence selected from the group of SEQ ID NO:22 (i.e., CsaNIN; Cannabis sativa), SEQ ID NO:78 (i.e., HluNIN; Humulus lupulus), SEQ ID NO:89 (i.e., LjNIN; Lotus japonicus), SEQ ID NO:108 (i.e., MtNIN; Medicago truncatula); SEQ ID NO:136 (i.e., PanNIN; Parasponia andersonii), SEQ ID NO:139 (i.e., PriNIN; Parasponia rigida), SEQ ID NO:142 (i.e., PruNIN; Parasponia rugosa), SEQ ID NO:185 (i.e., TleNIN; Trema levigata), SEQ ID NO:187 (i.e., TorNIN; Trema orientalis), SEQ ID NO:190 (i.e., TtoNIN; Trema tomentosa), SEQ ID NO:236 (i.e., ZjuNIN; Ziziphus jujuba), SEQ ID NO:687 (i.e., AglNIN; Alnus glutinosa), SEQ ID NO:688 (i.e., CglNIN; Casuarina glauca), SEQ ID NO:689 (i.e., DglNIN.1; Datisca glomerata), SEQ ID NO:690 (i.e., DglNIN.2; Datisca glomerata), SEQ ID NO:691 (i.e., DtrNIN; Discaria trinervis), SEQ ID NO:692 (i.e., DdrNIN; Dryas drummondii), or SEQ ID NO:693 (i.e., PtrNIN; Purshia tridentata). Still another embodiment of this aspect includes the NIN/NLP1 orthogroup protein being a NIN protein and having at least 70% sequence identity, at least 75% sequence identity, at least 80% sequence identity, at least 85% sequence identity, at least 90% sequence identity, at least 95% sequence identity, at least 96% sequence identity, at least 97% sequence identity, at least 98% sequence identity, or at least 99% sequence identity to an amino acid sequence selected from the group of SEQ ID NO:89 (i.e., LjNIN; Lotus japonicus) or SEQ ID NO:108 (i.e., MtNIN; Medicago truncatula).

[0024] Yet another embodiment of this aspect that can be combined with any of the preceding embodiments that has a genetically altered plant includes the nucleic acid encoding a NLP2-3 orthogroup protein, a NLP4 orthogroup protein, or a basal NIN/NLP orthogroup protein. An additional embodiment of this aspect includes the NLP2-3 orthogroup protein having at least 70% sequence identity, at least 75% sequence identity, at least 80% sequence identity, at least 85% sequence identity, at least 90% sequence identity, at least 95% sequence identity, at least 96% sequence identity, at least 97% sequence identity, at least 98% sequence identity, or at least 99% sequence identity to an amino acid sequence selected from the group of SEQ ID NO:237, SEQ ID NO:238, SEQ ID NO:239, SEQ ID NO:241, SEQ ID NO:242, SEQ ID NO:243, SEQ ID NO:244, SEQ ID NO:245, SEQ ID NO:246, SEQ ID NO:247, SEQ ID NO:248, SEQ ID NO:250, SEQ ID NO:251, SEQ ID NO:252, SEQ ID NO:253, SEQ ID NO:254, SEQ ID NO:255, SEQ ID NO:256, SEQ ID NO:257, SEQ ID NO:258, SEQ ID NO:259, SEQ ID NO:260, SEQ ID NO:261, SEQ ID NO:262, SEQ ID NO:263, SEQ ID NO:264, SEQ ID NO:265, SEQ ID NO:266, SEQ ID NO:267, SEQ ID NO:268, SEQ ID NO:269, SEQ ID NO:270, SEQ ID NO:271, SEQ ID NO:273, SEQ ID NO:274, SEQ ID NO:275, SEQ ID NO:276, SEQ ID NO:277, SEQ ID NO:278, SEQ ID NO:279, SEQ ID NO:280, SEQ ID NO:281, SEQ ID NO:282, SEQ ID NO:283, SEQ ID NO:284, SEQ ID NO:285, SEQ ID NO:286, SEQ ID NO:287, SEQ ID NO:288, SEQ ID NO:289, SEQ ID NO:290, SEQ ID NO:291, SEQ ID NO:292, SEQ ID NO:293, SEQ ID NO:294, SEQ ID NO:295, SEQ ID NO:296, SEQ ID NO:297, SEQ ID NO:298, SEQ ID NO:299, SEQ ID NO:300, SEQ ID NO:301, SEQ ID NO:302, SEQ ID NO:303, SEQ ID NO:304, SEQ ID NO:305, SEQ ID NO:306, SEQ ID NO:307, SEQ ID NO:308, SEQ ID NO:309, SEQ ID NO:310, SEQ ID NO:311, SEQ ID NO:312, SEQ ID NO:313, SEQ ID NO:314, SEQ ID NO:315, SEQ ID NO:316, SEQ ID NO:317, SEQ ID NO:318, SEQ ID NO:319, SEQ ID NO:320, SEQ ID NO:321, SEQ ID NO:322, SEQ ID NO:323, SEQ ID NO:324, SEQ ID NO:325, SEQ ID NO:326, SEQ ID NO:327, SEQ ID NO:328, SEQ ID NO:329, SEQ ID NO:332, SEQ ID NO:333, SEQ ID NO:334, SEQ ID NO:335, SEQ ID NO:336, SEQ ID NO:337, SEQ ID NO:338, SEQ ID NO:339, SEQ ID NO:340, SEQ ID NO:341, SEQ ID NO:342, SEQ ID NO:343, SEQ ID NO:344, SEQ ID NO:345, SEQ ID NO:346, SEQ ID NO:347, SEQ ID NO:348, SEQ ID NO:349, SEQ ID NO:350, SEQ ID NO:351, SEQ ID NO:352, SEQ ID NO:353, SEQ ID NO:354, SEQ ID NO:355, SEQ ID NO:356, SEQ ID NO:357, SEQ ID NO:358, SEQ ID NO:359, SEQ ID NO:360, SEQ ID NO:361, SEQ ID NO:362, SEQ ID NO:363, SEQ ID NO:364, SEQ ID NO:365, SEQ ID NO:366, SEQ ID NO:367, SEQ ID NO:368, SEQ ID NO:369, SEQ ID NO:371, SEQ ID NO:372, SEQ ID NO:373, SEQ ID NO:374, SEQ ID NO:375, SEQ ID NO:376, and SEQ ID NO:377. Yet another embodiment of this aspect includes the NLP4 orthogroup protein having at least 70% sequence identity, at least 75% sequence identity, at least 80% sequence identity, at least 85% sequence identity, at least 90% sequence identity, at least 95% sequence identity, at least 96% sequence identity, at least 97% sequence identity, at least 98% sequence identity, or at least 99% sequence identity to an amino acid sequence selected from the group of SEQ ID NO:378, SEQ ID NO:379, SEQ ID NO:380, SEQ ID NO:381, SEQ ID NO:382, SEQ ID NO:383, SEQ ID NO:384, SEQ ID NO:385, SEQ ID NO:386, SEQ ID NO:387, SEQ ID NO:388, SEQ ID NO:389, SEQ ID NO:390, SEQ ID NO:391, SEQ ID NO:392, SEQ ID NO:393, SEQ ID NO:394, SEQ ID NO:395, SEQ ID NO:396, SEQ ID NO:397, SEQ ID NO:398, SEQ ID NO:399, SEQ ID NO:400, SEQ ID NO:401, SEQ ID NO:402, SEQ ID NO:403, SEQ ID NO:404, SEQ ID NO:405, SEQ ID NO:406, SEQ ID NO:408, SEQ ID NO:409, SEQ ID NO:410, SEQ ID NO:411, SEQ ID NO:412, SEQ ID NO:413, SEQ ID NO:414, SEQ ID NO:415, SEQ ID NO:417, SEQ ID NO:418, SEQ ID NO:419, SEQ ID NO:420, SEQ ID NO:421, SEQ ID NO:422, SEQ ID NO:423, SEQ ID NO:424, SEQ ID NO:425, SEQ ID NO:426, SEQ ID NO:427, SEQ ID NO:428, SEQ ID NO:429, SEQ ID NO:430, SEQ ID NO:431, SEQ ID NO:432, SEQ ID NO:433, SEQ ID NO:434, SEQ ID NO:435, SEQ ID NO:436, SEQ ID NO:437, SEQ ID NO:438, SEQ ID NO:439, SEQ ID NO:440, SEQ ID NO:441, SEQ ID NO:442, SEQ ID NO:443, SEQ ID NO:444, SEQ ID NO:445, SEQ ID NO:446, SEQ ID NO:447, SEQ ID NO:448, SEQ ID NO:449, SEQ ID NO:450, SEQ ID NO:451, SEQ ID NO:452, SEQ ID NO:453, SEQ ID NO:455, SEQ ID NO:456, SEQ ID NO:457, SEQ ID NO:458, SEQ ID NO:459, SEQ ID NO:460, SEQ ID NO:461, SEQ ID NO:462, SEQ ID NO:463, SEQ ID NO:464, SEQ ID NO:465, SEQ ID NO:466, SEQ ID NO:467, SEQ ID NO:468, SEQ ID NO:469, SEQ ID NO:470, SEQ ID NO:471, SEQ ID NO:472, SEQ ID NO:473, SEQ ID NO:474, SEQ ID NO:475, SEQ ID NO:476, SEQ ID NO:477, SEQ ID NO:478, SEQ ID NO:479, SEQ ID NO:480, SEQ ID NO:481, SEQ ID NO:482, SEQ ID NO:483, SEQ ID NO:484, SEQ ID NO:485, SEQ ID NO:486, SEQ ID NO:487, SEQ ID NO:488, SEQ ID NO:489, SEQ ID NO:490, SEQ ID NO:491, SEQ ID NO:492, SEQ ID NO:493, SEQ ID NO:494, SEQ ID NO:495, SEQ ID NO:496, SEQ ID NO:497, SEQ ID NO:498, SEQ ID NO:499, SEQ ID NO:500, SEQ ID NO:501, SEQ ID NO:502, SEQ ID NO:504, SEQ ID NO:505, SEQ ID NO:506, SEQ ID NO:507, SEQ ID NO:508, SEQ ID NO:509, SEQ ID NO:510, SEQ ID NO:511, SEQ ID NO:512, SEQ ID NO:513, SEQ ID NO:514, SEQ ID NO:515, SEQ ID NO:516, SEQ ID NO:517, SEQ ID NO:518, SEQ ID NO:519, SEQ ID NO:520, SEQ ID NO:521, SEQ ID NO:522, SEQ ID NO:523, and SEQ ID NO: 524. A further embodiment of this aspect includes the basal NIN/NLP orthogroup protein having at least 70% sequence identity, at least 75% sequence identity, at least 80% sequence identity, at least 85% sequence identity, at least 90% sequence identity, at least 95% sequence identity, at least 96% sequence identity, at least 97% sequence identity, at least 98% sequence identity, or at least 99% sequence identity to an amino acid sequence selected from the group of SEQ ID NO:637, SEQ ID NO:638, SEQ ID NO:639, SEQ ID NO:640, SEQ ID NO:641, SEQ ID NO:642, SEQ ID NO:643, SEQ ID NO:644, SEQ ID NO:645, SEQ ID NO:646, SEQ ID NO:647, SEQ ID NO:648, SEQ ID NO:649, SEQ ID NO:650, SEQ ID NO:651, SEQ ID NO:652, SEQ ID NO:653, SEQ ID NO:654, SEQ ID NO:655, SEQ ID NO:656, SEQ ID NO:657, SEQ ID NO:658, SEQ ID NO:659, SEQ ID NO:660, SEQ ID NO:661, or SEQ ID NO:662.

[0025] In yet another embodiment, which may be combined with any of the preceding embodiments, the nucleic acid encoding the NIN protein or the NLP protein is endogenous. Still another embodiment of this aspect that can be combined with any of the preceding embodiments includes the nucleic acid encoding the NIN protein or the NLP protein being heterologous. Yet another embodiment of this present aspect that can be combined with any of the preceding aspects that has the nucleic acid encoding the NIN protein or the NLP protein operably linked to a promoter includes the promoter being endogenous. Still another embodiment of this aspect that can be combined with any of the preceding aspects that has the nucleic acid encoding the NIN protein or the NLP protein operably linked to a promoter includes the promoter being heterologous.

[0026] In still another embodiment, which may be combined with any of the preceding embodiments, cytokinin signaling or induction of the cytokinin signaling pathway in a root pericycle cell layer, a root endodermis cell layer (i.e., endodermal cell layer), root cortex cell layers (i.e., cortical cell layer), and/or a root epidermis cell layer (i.e., epidermal cell layer) induces nodule organogenesis. Still another embodiment of this aspect that can be combined with any of the preceding embodiments further includes one or more CYCLOPS response elements operably linked to the nucleic acid. An additional embodiment of this aspect includes CYCLOPS expression in a root epidermis cell layer (i.e., epidermal cell layer) inducing rhizobium infection.

[0027] In a further embodiment, which may be combined with any of the preceding embodiments, the genetically altered plant is a monocot. An additional embodiment of this aspect includes the genetically altered plant being selected from the group of corn, rice, wheat, barley, sorghum, millet, oat, or rye. Still another embodiment of this aspect that can be combined with any of the preceding embodiments further includes the genetically altered plant being selected from the group of apple, pear, plum, apricot, peach, almond, walnut, cherry, strawberry, raspberry, blackberry, red currant, black currant, melon, cucumber, pumpkin, squash, grape, hemp, hops, birch, beech, jujube, cassava, poplar, chestnut, citrus, potato, tomato, sweet potato, Trema spp., and Jatropha spp. In yet another embodiment, which may be combined with any of the preceding embodiments, the WT plant is not a legume, does not form nodules for symbiosis with nitrogen fixing bacteria, or both is not a legume and does not form nodules for symbiosis with nitrogen fixing bacteria.

[0028] Still another embodiment of this aspect that can be combined with any of the preceding embodiments includes a genetically altered plant part of the genetically altered plant of any one of the preceding embodiments with respect to plant parts, wherein the plant part is a leaf, a stem, a root, a tuber, a flower, a seed, a kernel, a grain, a fruit, a cell, or a portion thereof and the genetically altered plant part includes the one or more genetic alterations. An additional embodiment of this aspect includes the plant part being a fruit, a tuber, a kernel, or a grain. Yet another embodiment of this aspect that can be combined with any of the preceding embodiments with respect to pollen grain or ovules includes a genetically altered pollen grain or a genetically altered ovule of the plant of any one of the preceding embodiments, wherein the genetically altered pollen grain or the genetically altered ovule includes the one or more genetic alterations. A further embodiment of this aspect that can be combined with any of the preceding embodiments includes a genetically altered protoplast produced from the genetically altered plant of any of the preceding embodiments, wherein the genetically altered protoplast includes the one or more genetic alterations. An additional embodiment of this aspect that can be combined with any of the preceding embodiments includes a genetically altered tissue culture produced from protoplasts or cells from the genetically altered plant of any one of the preceding embodiments, wherein the cells or protoplasts are produced from a plant part selected from the group of leaf, leaf mesophyll cell, anther, pistil, stem, petiole, root, root tip, tuber, fruit, seed, kernel, grain, flower, cotyledon, hypocotyl, embryo, or meristematic cell, wherein the genetically altered tissue culture includes the one or more genetic alterations. An additional embodiment of this aspect includes a genetically altered plant regenerated from the genetically altered tissue culture that includes the one or more genetic alterations. Still another embodiment of this aspect that can be combined with any of the preceding embodiments that has a genetically altered plant includes the genetically altered plant having all the physiological and morphological characteristics of the plant of any of the preceding embodiments. Yet another embodiment of this aspect that can be combined with any of the preceding embodiments that has a genetically altered plant includes a genetically altered plant seed produced from the genetically altered plant of any one of the preceding embodiments. A further embodiment of this aspect that can be combined with any of the preceding embodiments that has a genetically altered plant includes the seed of the plant producing a plant having all the physiological and morphological characteristics of the plant of any of the above embodiments.

[0029] An additional aspect of the disclosure includes methods of producing the genetically altered plant of any of the preceding embodiments that has a genetically altered plant, including the steps of: (a) introducing the one or more genetic alterations into a plant cell, tissue, or other explant; (b) regenerating the plant cell, tissue, or other explant into a genetically altered plantlet; and (c) growing the genetically altered plantlet into a genetically altered plant with the one or more genetic alterations that increase activity of the NIN protein or the NLP protein in response to cytokinin signaling as compared to an untransformed WT plant. An additional embodiment of this aspect further includes identifying successful introduction of the one or more genetic alterations by screening or selecting the plant cell, tissue, or other explant prior to step (b); screening or selecting plantlets between step (b) and (c); or screening or selecting plants after step (c). In yet another embodiment, which may be combined with any of the preceding embodiments, transformation is done using a transformation method selected from the group of particle bombardment (i.e., biolistics, gene gun), Agrobacterium-mediated transformation, Rhizobium-mediated transformation, or protoplast transfection or transformation.

[0030] Still another embodiment of this aspect that can be combined with any of the preceding embodiments includes genetic alterations being introduced with a vector. An additional embodiment of this aspect includes the vector including a promoter operably linked to a nucleotide encoding a NIN or NLP protein and one or more cytokinin response elements operably linked to the promoter. Yet another embodiment of this aspect includes the promoter and the one or more cytokinin response elements being selected from the group of a NIN gene promoter including a 5′-upstream sequence including a CYCLOPS response element through a transcription start site of the NIN gene operably linked to a 3C region, the NIN gene promoter comprising a 5′-upstream sequence including the CYCLOPS response element through to the transcription start site of the NIN gene operably linked to a CE region, a minimal promoter operably linked to a CYCLOPS response element operably linked to a CE region, and a minimal promoter operably linked to a CYCLOPS response element operably linked to one or more cytokinin response elements. In a further embodiment of this aspect, the vector includes one or more gene editing components that target a nuclear genome sequence operably linked to an endogenous NIN protein or NLP protein. Yet another embodiment of this aspect includes the nuclear genome sequence being edited by the one or more gene editing components to introduce a cis-regulatory element selected from the group of one or more cytokinin response elements, a 3C region, or a CE region. Yet another embodiment of this present aspect that can be combined with any of the preceding aspects that has a vector including one or more gene editing components includes one or more gene editing components being selected from the group of a ribonucleoprotein complex that targets the nuclear genome sequence; a vector including a TALEN protein encoding sequence, wherein the TALEN protein targets the nuclear genome sequence; a vector including a ZFN protein encoding sequence, wherein the ZFN protein targets the nuclear genome sequence; an oligonucleotide donor (ODN), wherein the ODN targets the nuclear genome sequence; or a vector including a CRISPR/Cas enzyme encoding sequence and a targeting sequence, wherein the targeting sequence targets the nuclear genome sequence.

[0031] A further embodiment of this present aspect that can be combined with any of the preceding aspects that has genetic alterations being introduced with a vector includes the NIN gene promoter, 3C region, CE region, CYCLOPS response element, or one or more cytokinin response elements being from a nodulating legume species. An additional embodiment of this aspect includes the nodulating legume species being selected from the group of peanut, pigeon pea, chickpea, soybean, velvet bean, bean, pea, adzuki bean, mung bean, clover, lupine, Lotus japonicus, and Medicago truncatula. Yet another embodiment of this present aspect that can be combined with any of the preceding aspects that has genetic alterations being introduced with a vector wherein the vector includes the NIN gene promoter, 3C region, CE region, CYCLOPS response element, or one or more cytokinin response elements from a nodulating legume species includes cytokinin response elements being selected from the group of SEQ ID NO:551, SEQ ID NO:552, SEQ ID NO:553, SEQ ID NO:554, SEQ ID NO:555, SEQ ID NO:556, SEQ ID NO:557, SEQ ID NO:558, SEQ ID NO:559, SEQ ID NO:560, SEQ ID NO:561, SEQ ID NO:562, SEQ ID NO:563, SEQ ID NO:564, SEQ ID NO:565, SEQ ID NO:566, SEQ ID NO:567, SEQ ID NO:568, SEQ ID NO:569, SEQ ID NO:570, SEQ ID NO:571, SEQ ID NO:572, SEQ ID NO:573, SEQ ID NO:574, SEQ ID NO:575, SEQ ID NO:576, SEQ ID NO:577, SEQ ID NO:578, SEQ ID NO:579, SEQ ID NO:580, SEQ ID NO:581, SEQ ID NO:582, SEQ ID NO:583, SEQ ID NO:584, SEQ ID NO:585, SEQ ID NO:586, SEQ ID NO:587, SEQ ID NO:588, SEQ ID NO:589, SEQ ID NO:590, SEQ ID NO:591, SEQ ID NO:592, SEQ ID NO:593, SEQ ID NO:594, SEQ ID NO:595, SEQ ID NO:596, SEQ ID NO:597, SEQ ID NO:598, SEQ ID NO:599, SEQ ID NO:600, SEQ ID NO:601, SEQ ID NO:602, SEQ ID NO:603, SEQ ID NO:604, SEQ ID NO:605, SEQ ID NO:606, SEQ ID NO:607, SEQ ID NO:608, SEQ ID NO:609, SEQ ID NO:610, SEQ ID NO:611, or SEQ ID NO:612. Still another embodiment of this present aspect that can be combined with any of the preceding aspects that has genetic alterations being introduced with a vector includes cytokinin response elements being selected from the group of SEQ ID NO:613, SEQ ID NO:614, SEQ ID NO:615, SEQ ID NO:616, SEQ ID NO:617, SEQ ID NO:618, SEQ ID NO:619, SEQ ID NO:620, SEQ ID NO:621, SEQ ID NO:622, SEQ ID NO:623, SEQ ID NO:624, SEQ ID NO:625, or SEQ ID NO:626. Yet another embodiment of this present aspect that can be combined with any of the preceding aspects that has genetic alterations being introduced with a vector includes one or more cytokinin response elements being from a non-nodulating species. In yet another embodiment of this present aspect that can be combined with any of the preceding aspects that has genetic alterations being introduced with a vector, the one or more cytokinin response elements from a non-nodulating species is SEQ ID NO:613. A further embodiment of this present aspect that can be combined with any of the preceding aspects that has genetic alterations being introduced with a vector includes the one or more cytokinin response elements being from a nodulating non-legume species. An additional embodiment of this present aspect that can be combined with any of the preceding aspects that has genetic alterations being introduced with a vector includes cytokinin response elements being selected from the group of SEQ ID NO:613, SEQ ID NO:614, SEQ ID NO:679, SEQ ID NO:680, SEQ ID NO:681, SEQ ID NO:682, SEQ ID NO:683, SEQ ID NO:684, SEQ ID NO:685, or SEQ ID NO:686.

[0032] A further embodiment of this present aspect that can be combined with any of the preceding aspects that has genetic alterations being introduced with a vector includes the NIN or NLP protein being a NIN/NLP1 orthogroup protein and having at least 70% sequence identity, at least 75% sequence identity, at least 80% sequence identity, at least 85% sequence identity, at least 90% sequence identity, at least 95% sequence identity, at least 96% sequence identity, at least 97% sequence identity, at least 98% sequence identity, or at least 99% sequence identity to an amino acid sequence selected from the group of SEQ ID NO:1, SEQ ID NO:2, SEQ ID NO:3, SEQ ID NO:4, SEQ ID NO:5, SEQ ID NO:6, SEQ ID NO:8, SEQ ID NO:9, SEQ ID NO:10, SEQ ID NO:11, SEQ ID NO:12, SEQ ID NO:13, SEQ ID NO:14, SEQ ID NO:15, SEQ ID NO:16, SEQ ID NO:17, SEQ ID NO:18, SEQ ID NO:19, SEQ ID NO:20, SEQ ID NO:21, SEQ ID NO:22; SEQ ID NO:23, SEQ ID NO:24, SEQ ID NO:25, SEQ ID NO:26, SEQ ID NO:27, SEQ ID NO:28, SEQ ID NO:29, SEQ ID NO:30, SEQ ID NO:31, SEQ ID NO:32, SEQ ID NO:33, SEQ ID NO:34, SEQ ID NO:35, SEQ ID NO:36, SEQ ID NO:37, SEQ ID NO:38, SEQ ID NO:39, SEQ ID NO:40, SEQ ID NO:41, SEQ ID NO:42, SEQ ID NO:43, SEQ ID NO:44, SEQ ID NO:45, SEQ ID NO:46, SEQ ID NO:47, SEQ ID NO:48, SEQ ID NO:49, SEQ ID NO:50, SEQ ID NO:51, SEQ ID NO:52, SEQ ID NO:53, SEQ ID NO:54, SEQ ID NO:55, SEQ ID NO:56, SEQ ID NO:57, SEQ ID NO:58, SEQ ID NO:59, SEQ ID NO:60, SEQ ID NO:61, SEQ ID NO:62, SEQ ID NO:63, SEQ ID NO:64, SEQ ID NO:65, SEQ ID NO:66, SEQ ID NO:67, SEQ ID NO:68, SEQ ID NO:69, SEQ ID NO:70, SEQ ID NO:71, SEQ ID NO:72, SEQ ID NO:73, SEQ ID NO:74, SEQ ID NO:75, SEQ ID NO:76, SEQ ID NO:77, SEQ ID NO:78, SEQ ID NO:79, SEQ ID NO:80, SEQ ID NO:81, SEQ ID NO:82, SEQ ID NO:83, SEQ ID NO:84, SEQ ID NO:85, SEQ ID NO:86, SEQ ID NO:87, SEQ ID NO:88, SEQ ID NO:89, SEQ ID NO:90, SEQ ID NO:91, SEQ ID NO:92, SEQ ID NO:93, SEQ ID NO:94, SEQ ID NO:95, SEQ ID NO:96, SEQ ID NO:98, SEQ ID NO:99, SEQ ID NO:100, SEQ ID NO:101, SEQ ID NO:102, SEQ ID NO:103, SEQ ID NO:104, SEQ ID NO:105, SEQ ID NO:106, SEQ ID NO:108, SEQ ID NO:109, SEQ ID NO:131, SEQ ID NO:132, SEQ ID NO:133, SEQ ID NO:134, SEQ ID NO:135, SEQ ID NO:136, SEQ ID NO:137, SEQ ID NO:138, SEQ ID NO:139, SEQ ID NO:140, SEQ ID NO:141, SEQ ID NO:142, SEQ ID NO:143, SEQ ID NO:144, SEQ ID NO:145, SEQ ID NO:146, SEQ ID NO:147, SEQ ID NO:148, SEQ ID NO:149, SEQ ID NO:150, SEQ ID NO:151, SEQ ID NO:152, SEQ ID NO:153, SEQ ID NO:154, SEQ ID NO:155, SEQ ID NO:156, SEQ ID NO:157, SEQ ID NO:158, SEQ ID NO:159, SEQ ID NO:160, SEQ ID NO:161, SEQ ID NO:162, SEQ ID NO:163, SEQ ID NO:164, SEQ ID NO:165, SEQ ID NO:166, SEQ ID NO:167, SEQ ID NO:168, SEQ ID NO:169, SEQ ID NO:170, SEQ ID NO:171, SEQ ID NO:172, SEQ ID NO:173, SEQ ID NO:174, SEQ ID NO:175, SEQ ID NO:177, SEQ ID NO:178, SEQ ID NO:179, SEQ ID NO:180, SEQ ID NO:181, SEQ ID NO:182, SEQ ID NO:183, SEQ ID NO:184, SEQ ID NO:185, SEQ ID NO:186, SEQ ID NO:187, SEQ ID NO:188, SEQ ID NO:189, SEQ ID NO:190, SEQ ID NO:191, SEQ ID NO:192, SEQ ID NO:193, SEQ ID NO:194, SEQ ID NO:196, SEQ ID NO:197, SEQ ID NO:198, SEQ ID NO:199, SEQ ID NO:200, SEQ ID NO:201, SEQ ID NO:202, SEQ ID NO:203, SEQ ID NO:204, SEQ ID NO:205, SEQ ID NO:206, SEQ ID NO:207, SEQ ID NO:208, SEQ ID NO:209, SEQ ID NO:210, SEQ ID NO:211, SEQ ID NO:212, SEQ ID NO:213, SEQ ID NO:214, SEQ ID NO:215, SEQ ID NO:216, SEQ ID NO:217, SEQ ID NO:218, SEQ ID NO:219, SEQ ID NO:220, SEQ ID NO:221, SEQ ID NO:222, SEQ ID NO:223, SEQ ID NO:224, SEQ ID NO:225, SEQ ID NO:226, SEQ ID NO:227, SEQ ID NO:228, SEQ ID NO:229, SEQ ID NO:230, SEQ ID NO:231, SEQ ID NO:232, SEQ ID NO:233, SEQ ID NO:234, SEQ ID NO:235, SEQ ID NO:236, SEQ ID NO:687, SEQ ID NO:688, SEQ ID NO:689, SEQ ID NO:690, SEQ ID NO:691, SEQ ID NO:692, or SEQ ID NO:693. Yet another embodiment of this present aspect that can be combined with any of the preceding aspects that has genetic alterations being introduced with a vector includes the NIN/NLP1 orthogroup protein being a NIN protein and having at least 70% sequence identity, at least 75% sequence identity, at least 80% sequence identity, at least 85% sequence identity, at least 90% sequence identity, at least 95% sequence identity, at least 96% sequence identity, at least 97% sequence identity, at least 98% sequence identity, or at least 99% sequence identity to an amino acid sequence selected from the group of SEQ ID NO:22 (i.e., CsaNIN; Cannabis sativa), SEQ ID NO:78 (i.e., HluNIN; Humulus lupulus), SEQ ID NO:89 (i.e., LjNIN; Lotus japonicus), SEQ ID NO:108 (i.e., MtNIN; Medicago truncatula); SEQ ID NO:136 (i.e., PanNIN; Parasponia andersonii), SEQ ID NO:139 (i.e., PriNIN; Parasponia rigida), SEQ ID NO:142 (i.e., PruNIN; Parasponia rugosa), SEQ ID NO:185 (i.e., TleNIN; Trema levigata), SEQ ID NO:187 (i.e., TorNIN; Trema orientalis), SEQ ID NO:190 (i.e., TtoNIN; Trema tomentosa), and SEQ ID NO:236 (i.e., ZjuNIN; Ziziphus jujuba), SEQ ID NO:687 (i.e., AglNIN; Alnus glutinosa), SEQ ID NO:688 (i.e., CglNIN; Casuarina glauca), SEQ ID NO:689 (i.e., DglNIN.1; Datisca glomerata), SEQ ID NO:690 (i.e., DglNIN.2; Datisca glomerata), SEQ ID NO:691 (i.e., DtrNIN; Discaria trinervis), SEQ ID NO:692 (i.e., DdrNIN; Dryas drummondii), or SEQ ID NO:693 (i.e., PtrNIN; Purshia tridentata). A further embodiment of this present aspect that can be combined with any of the preceding aspects that has genetic alterations being introduced with a vector includes the NIN/NLP1 orthogroup protein being a NIN protein and having at least 70% sequence identity, at least 75% sequence identity, at least 80% sequence identity, at least 85% sequence identity, at least 90% sequence identity, at least 95% sequence identity, at least 96% sequence identity, at least 97% sequence identity, at least 98% sequence identity, or at least 99% sequence identity to an amino acid sequence selected from the group of SEQ ID NO:89 (i.e., LjNIN; Lotus japonicus) or SEQ ID NO:108 (i.e., MtNIN; Medicago truncatula). Still another embodiment of this present aspect that can be combined with any of the preceding aspects that has genetic alterations being introduced with a vector includes the NIN or NLP protein being a NLP2-3 orthogroup protein and having at least 70% sequence identity, at least 75% sequence identity, at least 80% sequence identity, at least 85% sequence identity, at least 90% sequence identity, at least 95% sequence identity, at least 96% sequence identity, at least 97% sequence identity, at least 98% sequence identity, or at least 99% sequence identity to an amino acid sequence selected from the group of SEQ ID NO:237, SEQ ID NO:238, SEQ ID NO:239, SEQ ID NO:241, SEQ ID NO:242, SEQ ID NO:243, SEQ ID NO:244, SEQ ID NO:245, SEQ ID NO:246, SEQ ID NO:247, SEQ ID NO:248, SEQ ID NO:250, SEQ ID NO:251, SEQ ID NO:252, SEQ ID NO:253, SEQ ID NO:254, SEQ ID NO:255, SEQ ID NO:256, SEQ ID NO:257, SEQ ID NO:258, SEQ ID NO:259, SEQ ID NO:260, SEQ ID NO:261, SEQ ID NO:262, SEQ ID NO:263, SEQ ID NO:264, SEQ ID NO:265, SEQ ID NO:266, SEQ ID NO:267, SEQ ID NO:268, SEQ ID NO:269, SEQ ID NO:270, SEQ ID NO:271, SEQ ID NO:273, SEQ ID NO:274, SEQ ID NO:275, SEQ ID NO:276, SEQ ID NO:277, SEQ ID NO:278, SEQ ID NO:279, SEQ ID NO:280, SEQ ID NO:281, SEQ ID NO:282, SEQ ID NO:283, SEQ ID NO:284, SEQ ID NO:285, SEQ ID NO:286, SEQ ID NO:287, SEQ ID NO:288, SEQ ID NO:289, SEQ ID NO:290, SEQ ID NO:291, SEQ ID NO:292, SEQ ID NO:293, SEQ ID NO:294, SEQ ID NO:295, SEQ ID NO:296, SEQ ID NO:297, SEQ ID NO:298, SEQ ID NO:299, SEQ ID NO:300, SEQ ID NO:301, SEQ ID NO:302, SEQ ID NO:303, SEQ ID NO:304, SEQ ID NO:305, SEQ ID NO:306, SEQ ID NO:307, SEQ ID NO:308, SEQ ID NO:309, SEQ ID NO:310, SEQ ID NO:311, SEQ ID NO:312, SEQ ID NO:313, SEQ ID NO:314, SEQ ID NO:315, SEQ ID NO:316, SEQ ID NO:317, SEQ ID NO:318, SEQ ID NO:319, SEQ ID NO:320, SEQ ID NO:321, SEQ ID NO:322, SEQ ID NO:323, SEQ ID NO:324, SEQ ID NO:325, SEQ ID NO:326, SEQ ID NO:327, SEQ ID NO:328, SEQ ID NO:329, SEQ ID NO:332, SEQ ID NO:333, SEQ ID NO:334, SEQ ID NO:335, SEQ ID NO:336, SEQ ID NO:337, SEQ ID NO:338, SEQ ID NO:339, SEQ ID NO:340, SEQ ID NO:341, SEQ ID NO:342, SEQ ID NO:343, SEQ ID NO:344, SEQ ID NO:345, SEQ ID NO:346, SEQ ID NO:347, SEQ ID NO:348, SEQ ID NO:349, SEQ ID NO:350, SEQ ID NO:351, SEQ ID NO:352, SEQ ID NO:353, SEQ ID NO:354, SEQ ID NO:355, SEQ ID NO:356, SEQ ID NO:357, SEQ ID NO:358, SEQ ID NO:359, SEQ ID NO:360, SEQ ID NO:361, SEQ ID NO:362, SEQ ID NO:363, SEQ ID NO:364, SEQ ID NO:365, SEQ ID NO:366, SEQ ID NO:367, SEQ ID NO:368, SEQ ID NO:369, SEQ ID NO:371, SEQ ID NO:372, SEQ ID NO:373, SEQ ID NO:374, SEQ ID NO:375, SEQ ID NO:376, and SEQ ID NO:377. A further embodiment of this present aspect that can be combined with any of the preceding aspects that has genetic alterations being introduced with a vector includes the NIN or NLP protein being a NLP4 orthogroup protein and having at least 70% sequence identity, at least 75% sequence identity, at least 80% sequence identity, at least 85% sequence identity, at least 90% sequence identity, at least 95% sequence identity, at least 96% sequence identity, at least 97% sequence identity, at least 98% sequence identity, or at least 99% sequence identity to an amino acid sequence selected from the group of SEQ ID NO:378, SEQ ID NO:379, SEQ ID NO:380, SEQ ID NO:381, SEQ ID NO:382, SEQ ID NO:383, SEQ ID NO:384, SEQ ID NO:385, SEQ ID NO:386, SEQ ID NO:387, SEQ ID NO:388, SEQ ID NO:389, SEQ ID NO:390, SEQ ID NO:391, SEQ ID NO:392, SEQ ID NO:393, SEQ ID NO:394, SEQ ID NO:395, SEQ ID NO:396, SEQ ID NO:397, SEQ ID NO:398, SEQ ID NO:399, SEQ ID NO:400, SEQ ID NO:401, SEQ ID NO:402, SEQ ID NO:403, SEQ ID NO:404, SEQ ID NO:405, SEQ ID NO:406, SEQ ID NO:408, SEQ ID NO:409, SEQ ID NO:410, SEQ ID NO:411, SEQ ID NO:412, SEQ ID NO:413, SEQ ID NO:414, SEQ ID NO:415, SEQ ID NO:417, SEQ ID NO:418, SEQ ID NO:419, SEQ ID NO:420, SEQ ID NO:421, SEQ ID NO:422, SEQ ID NO:423, SEQ ID NO:424, SEQ ID NO:425, SEQ ID NO:426, SEQ ID NO:427, SEQ ID NO:428, SEQ ID NO:429, SEQ ID NO:430, SEQ ID NO:431, SEQ ID NO:432, SEQ ID NO:433, SEQ ID NO:434, SEQ ID NO:435, SEQ ID NO:436, SEQ ID NO:437, SEQ ID NO:438, SEQ ID NO:439, SEQ ID NO:440, SEQ ID NO:441, SEQ ID NO:442, SEQ ID NO:443, SEQ ID NO:444, SEQ ID NO:445, SEQ ID NO:446, SEQ ID NO:447, SEQ ID NO:448, SEQ ID NO:449, SEQ ID NO:450, SEQ ID NO:451, SEQ ID NO:452, SEQ ID NO:453, SEQ ID NO:455, SEQ ID NO:456, SEQ ID NO:457, SEQ ID NO:458, SEQ ID NO:459, SEQ ID NO:460, SEQ ID NO:461, SEQ ID NO:462, SEQ ID NO:463, SEQ ID NO:464, SEQ ID NO:465, SEQ ID NO:466, SEQ ID NO:467, SEQ ID NO:468, SEQ ID NO:469, SEQ ID NO:470, SEQ ID NO:471, SEQ ID NO:472, SEQ ID NO:473, SEQ ID NO:474, SEQ ID NO:475, SEQ ID NO:476, SEQ ID NO:477, SEQ ID NO:478, SEQ ID NO:479, SEQ ID NO:480, SEQ ID NO:481, SEQ ID NO:482, SEQ ID NO:483, SEQ ID NO:484, SEQ ID NO:485, SEQ ID NO:486, SEQ ID NO:487, SEQ ID NO:488, SEQ ID NO:489, SEQ ID NO:490, SEQ ID NO:491, SEQ ID NO:492, SEQ ID NO:493, SEQ ID NO:494, SEQ ID NO:495, SEQ ID NO:496, SEQ ID NO:497, SEQ ID NO:498, SEQ ID NO:499, SEQ ID NO:500, SEQ ID NO:501, SEQ ID NO:502, SEQ ID NO:504, SEQ ID NO:505, SEQ ID NO:506, SEQ ID NO:507, SEQ ID NO:508, SEQ ID NO:509, SEQ ID NO:510, SEQ ID NO:511, SEQ ID NO:512, SEQ ID NO:513, SEQ ID NO:514, SEQ ID NO:515, SEQ ID NO:516, SEQ ID NO:517, SEQ ID NO:518, SEQ ID NO:519, SEQ ID NO:520, SEQ ID NO:521, SEQ ID NO:522, SEQ ID NO:523, and SEQ ID NO:524. An additional embodiment of this present aspect that can be combined with any of the preceding aspects that has genetic alterations being introduced with a vector includes the NIN or NLP protein being a basal NIN/NLP orthogroup protein and having at least 70% sequence identity, at least 75% sequence identity, at least 80% sequence identity, at least 85% sequence identity, at least 90% sequence identity, at least 95% sequence identity, at least 96% sequence identity, at least 97% sequence identity, at least 98% sequence identity, or at least 99% sequence identity to an amino acid sequence selected from the group of SEQ ID NO:637, SEQ ID NO:638, SEQ ID NO:639, SEQ ID NO:640, SEQ ID NO:641, SEQ ID NO:642, SEQ ID NO:643, SEQ ID NO:644, SEQ ID NO:645, SEQ ID NO:646, SEQ ID NO:647, SEQ ID NO:648, SEQ ID NO:649, SEQ ID NO:650, SEQ ID NO:651, SEQ ID NO:652, SEQ ID NO:653, SEQ ID NO:654, SEQ ID NO:655, SEQ ID NO:656, SEQ ID NO:657, SEQ ID NO:658, SEQ ID NO:659, SEQ ID NO:660, SEQ ID NO:661, or SEQ ID NO:662.

[0033] A further aspect of the disclosure includes methods of cultivating the genetically altered plant of any of the preceding embodiments that has a genetically altered plant, including the steps of: planting a genetically altered seedling, a genetically altered plantlet, a genetically altered cutting, a genetically altered tuber, a genetically altered root, or a genetically altered seed in soil to produce the genetically altered plant or grafting the genetically altered seedling, the genetically altered plantlet, or the genetically altered cutting to a root stock or a second plant grown in soil to produce the genetically altered plant; cultivating the plant to produce harvestable seed, harvestable leaves, harvestable roots, harvestable cuttings, harvestable wood, harvestable fruit, harvestable kernels, harvestable tubers, and/or harvestable grain; and harvesting the harvestable seed, harvestable leaves, harvestable roots, harvestable cuttings, harvestable wood, harvestable fruit, harvestable kernels, harvestable tubers, and/or harvestable grain.

### BRIEF DESCRIPTION OF THE DRAWINGS

[0034] The patent or application file contains at least one drawing executed in color. Copies of this patent or patent application publication with color drawing(s) will be provided by the Office upon request and payment of the necessary fee.

[0035] FIGS. 1A-1I show the phenotype of Medicago truncatula daphne-like (FN8113) mutant roots and the phenotype of M. truncatula A17 wild type (WT) roots inoculated with Sinorhizobium meliloti (rhizobial bacteria) strain RCR2011.pHC60. FIG. 1A shows a stereo transmitted light macroscopy image of infection threads in an A17 WT root (scale bar 2 mm). FIG. 1B shows a stereo fluorescence macroscopy image of infection threads in an A17 WT root (scale bar 2 mm). FIG. 1D shows a stereo transmitted light macroscopy image of infection threads in a daphne-like mutant root (scale bar 2 mm). FIG. 1E shows a stereo fluorescence macroscopy image of infection threads in a daphne-like mutant root (scale bar 2 mm). The comparison of FIGS. 1A-1B with FIGS. 1D-1E shows that daphne-like mutant roots (FIGS. 1D-1E) have an excessive number of infection threads in comparison to WT (FIGS. 1A-1B). FIGS. 1C and 1F show confocal images of seven days post inoculation (dpi) WT (FIG. 1C; scale bar 10 μm) and daphne-like mutant (FIG. 1F; scale bar 10 μm) roots stained with propidium iodide, and show that bacterial colonies (arrow head) and infection threads (arrow) are comparable in daphne-like mutant roots and in WT roots. FIG. 1G shows a longitudinal section of a three weeks post inoculation (wpi) daphne-like mutant root stained with toluidine blue, which shows that the infection thread (arrow) can occasionally reach cortical cell layers and that some cell divisions are induced (arrow head) (scale bar 50 μm; ep=epidermis; C4=cortical cell layer 4; C5=cortical cell layer 5; ed=endodermis; pc=pericycle; infection threads indicated by arrow; cell divisions indicated by arrow head). FIG. 1H shows a schematic representation of the NIN locus in the daphne-like mutant, which has a 2.49 MB Chromosome 2 insert (flanking sequences shown between arrows are SEQ ID NO:633 and SEQ ID NO:634) 4120 bp upstream of the NIN gene (thick grey arrow) start codon (“ATG” on thin black arrow). From left to right, Chromosome 5 sequences are SEQ ID NO:632, SEQ ID NO:635, and SEQ ID NO:636. The images shown in FIGS. 1A-1G are representative images from multiple replicates. FIG. 1I shows mean±SD of data from confocal images of fourteen days post inoculation (dpi) roots stained with propidium iodide (representative images of these roots are shown in FIGS. 1C and 1F).

[0036] FIGS. 2A-2M show partial complementation of the infection process in M. truncatula nin-1 mutant roots by introducing the construct ProNIN_{5kb}:NIN, the construct ProNIN_{2.2kb}:NIN, or the construct ProNIN5kb(Δcyclops):NIN using Agrobacterium rhizogenes-mediated transformation. FIG. 2A shows a longitudinal section of a nin-1 mutant root transformed with ProNIN_{5kb}:NIN stained with toluidine blue displaying infection threads (arrows) that occasionally can reach cortical cell layers (scale bar 50 μm; C4=cortical cell layer 4; C5=cortical cell layer 5; ed=endodermis; pc=pericycle; infection threads indicated by arrow). FIG. 2B shows a stereo transmitted light macroscopy image of a nin-1 mutant root transformed with ProNIN_{5kb}:NIN displaying excessive infection thread formation (scale bar 2 mm). FIG. 2C shows a stereo macroscopy fluorescence image of a nin-1 mutant root transformed with ProNIN_{5kb}:NIN displaying excessive infection thread formation (scale bar 2 mm). FIG. 2D shows a confocal image of a nin-1 mutant root transformed with ProNIN_{5kb}:NIN soot stained with propidium iodide displaying infection thread formation (long white line) initiated in a curled root hair (scale bar 10 μm). FIG. 2E shows a stereo transmitted light macroscopy image of a nin-1 mutant root transformed with ProNIN_{2.2kb}:NIN displaying numerous curled root hairs (scale bar 2 mm). FIG. 2F shows a stereo macroscopy fluorescence image of nin-1 roots transformed with ProNIN_{2.2kb}:NIN displaying numerous curled root hairs (scale bar 2 mm). FIG. 2G shows a confocal image of a nin-1 mutant root transformed with ProNIN_{2.2kb}:NIN root stained with propidium iodide displaying a bacterial curl colony (compact white shape) inside a curled root hair, but no infection thread formation (scale bar 10 μm). FIG. 2H shows a stereo transmitted light macroscopy image of a nin-1 mutant root transformed with empty vector without infection threads (scale bar 2 mm). FIG. 2I shows a stereo macroscopy fluorescence image of a nin-1 mutant root transformed with empty vector without infection threads (scale bar 2 mm). FIG. 2J shows a confocal image of a nin-1 mutant root transformed with empty vector stained with propidium iodide displaying excessive root hair curling without a bacterial colony (scale bar 10 μm). FIG. 2K shows a stereo transmitted light macroscopy image of nin-1 roots transformed with ProNIN5kb(Δcyclops):NIN displaying numerous curled root hairs (scale bar 2 mm). FIG. 2L shows a stereo macroscopy fluorescence image of nin-1 roots transformed with ProNIN5kb(Δcyclops):NIN displaying numerous curled root hairs (scale bar 2 mm). FIG. 2M shows a confocal image of a nin-1 mutant root transformed with ProNIN5kb(Δcyclops):NIN root stained with propidium iodide displaying a bacterial curl colony (compact white shape) inside a curled root hair, but no infection thread formation (scale bar 10 μm). FIGS. 2A-2M show images of roots collected at 4 wpi inoculation with S. meliloti RCR2011.pHC60 constitutively expressing GFP. The images shown in FIGS. 2A-2M are representative images from multiple replicates.

[0037] FIG. 3 shows mVISTA alignment of genomic DNA sequences containing 2 kb downstream from the NIN gene start codon, and NIN 5′-upstream regions from 8 legume species. The x-axis provides the distance from the M. truncatula NIN start codon in Kb (running right to left), while the y-axis provides the percentage conservation level to the M. truncatula sequence (running bottom to top for each legume species). Peaks indicate the level of sequence identity with M. truncatula on a scale of 50%-100%, whereby identities lower than 50% were not scored. Sequences 2 kb downstream from the NIN start codon are depicted to the right of the thin black arrow labelled “ATG”, 5′-non-coding upstream DNA sequences are depicted to the left of the thin black arrow. The two dark grey rectangles indicate the locations of the 3 Conserved region (3C region; left) and the −5 kb promoter region (right), and the grey vertical arrow indicates the location of the CYCLOPS binding site within the −5 kb promoter region.

[0038] FIGS. 4A and 4B show a schematic representation of the elements in the M. truncatula NIN 5′-upstream region and experimental results demonstrating that the cytokinin response elements containing (CE) region is essential for nodule organogenesis. FIG. 4A shows the 3C region present in the NIN 5′-upstream region as boxes located −15 Kb to −20 Kb upstream of the NIN coding sequence start site (NIN gene=thick grey arrow; start codon=“ATG” on thin black arrow). The middle region of the 3C region is the 1 Kb CE region, which contains a 472 bp conserved region is divided into three parts or domains named D1, D2, and D3 (depicted by grey boxes). FIG. 4A also shows the location of the insertion in the daphne-like mutant and the location of the CYCLOPS binding site, which are shown as labelled arrows located between −2.2 Kb and −5 Kb upstream of the NIN coding sequence start site. FIG. 4B shows the number of nodules formed on A17 WT M. truncatula roots transformed with empty vector (top bar) and M. truncatula nin-1 mutant roots transformed with empty vector or constructs carrying the NIN gene driven by different parts of the NIN 5′-upstream region (bottom 6 bars; each bar is labelled with the specific construct used). The ratio of nodulated roots to total roots tested (indicated with an arrow labelled “Nodulated roots/transgenic roots) is provided on the left of the graph. The graph shows the number of nodules per nodulated root, data are mean±SD, and nodule numbers were counted at 4 wpi with S. meliloti strain 2011.pHC60.

[0039] FIGS. 5A-5D show MAFFT alignments of the conserved part of the cytokinin response elements containing (CE) region (corresponding to the second or middle region of the larger 3C region) and the CYCLOPS binding site of 8 legume species. FIGS. 5A-5C shows MAFFT alignment of the conserved part (i.e., without flanking regions) of the CE region of 8 legume species; Medicago truncatula (SEQ ID NO: 663), Trifolium pratense (SEQ ID NO: 664), Cicer arietinum (SEQ ID NO: 665), Lotus japonicus (SEQ ID NO: 666), Glycine max (SEQ ID NO: 667), Cajanus cajan (SEQ ID NO: 668), Lupinus angustifolius (SEQ ID NO: 669), and Arachis duranensis (SEQ ID NO: 670). The conserved part of the CE region contains about 10 putative B-type cytokinin signaling RESPONSE REGULATOR (RR) binding sites (SEQ ID NO:613, bold text), and one AP2 binding element (SEQ ID NO:631, surrounded by black box in FIG. 5B). The conserved part of the CE region is divided into three domains named D1, D2, and D3, whose extent and boundaries are indicated by black arrows beneath the alignment and vertical black lines through the alignment. FIG. 5A shows the alignment of the 5′ portion of the of the conserved part of the CE region, which contains all of domain D1 and part of domain D2. FIG. 5B shows the alignment of the central portion of the conserved part of the CE region, which contains part of domain D2 and part of domain D3. FIG. 5C shows the alignment of the 3′ portion of the conserved part of the CE region, which contains part of domain D3. FIG. 5D shows MAFFT alignment of the CYCLOPS binding site of 8 legume species; Medicago truncatula (SEQ ID NO: 671), Arachis duranensis (SEQ ID NO: 672), Cicer arietinum (SEQ ID NO: 673), Lotus japonicus (SEQ ID NO: 674), Glycine max (SEQ ID NO: 675), Lupinus angustifolius (SEQ ID NO: 676), Cajanus cajan (SEQ ID NO: 677), and Trifolium pratense (SEQ ID NO: 678). The two boxes outlined with a dashed line indicate the palindromic sequence of the essential cis element, which is referred to as CYC-box and is also shown by labelled black arrows above the alignment, within the CYCLOPS response element (also referred to as CYCLOPS responsive cis element or CYC-RE).

[0040] FIGS. 6A-6H show complementation of non-nodulation phenotypes of M. truncatula nin-1 and daphne-like mutant roots by introducing the construct ProNIN_{3C-5kb}:NIN, ProNIN_{CE-5kb}:NIN, or ProNIN_{CE-35Smin}:NIN using A. rhizogenes-mediated transformation (35 min=Minimal CaMV 35S promoter). FIGS. 6A and 6C show that nodules are formed on transgenic roots of nin-1 when transformed with ProNIN_{3C-5kb}:NIN (FIG. 6A; scale bar 2 mm) or when transformed with ProNIN_{CE-5kb}:NIN (FIG. 6C; scale bar 2 mm). The nodules in the images in color can be seen as pink, which indicates the nodules are actively fixing nitrogen. FIGS. 6E and 6G show that nodules are formed on transgenic roots of daphne-like when transformed with ProNIN_{CE-5kb}:NIN (FIG. 6E; scale bar 2 mm) or when transformed with ProNIN_{CE-35Smin}:NIN (FIG. 6G; scale bar 2 mm). The nodules in the images in color can be seen as pink, which indicates the nodules are actively fixing nitrogen. FIGS. 6B and 6D show longitudinal sections of the nodules that are formed on transgenic roots of nin-1 when transformed with ProNIN_{3C-5kb}:NIN (FIG. 6B; scale bar 200 μm) or when transformed with ProNIN_{CE-5kb}:NIN (FIG. 6D; scale bar 200 μm) stained with toluidine blue, which have normal nodule zonation, including meristem (M), infection zone (IF), and fixation zone (FX). FIGS. 6F and 6H show longitudinal sections of a nodule that are formed on transgenic roots of daphne-like when transformed with ProNIN_{CE-5kb}:NIN (FIG. 6F; scale bar 200 μm) or when transformed with ProNIN_{CE-35Smin}:NIN (FIG. 6H; scale bar 200 μm) stained with toluidine blue, which have normal nodule zonation, including meristem (M), infection zone (IF), and fixation zone (FX). In FIGS. 6A-6H, S. meliloti strain RCR2011 containing constitutively expressed GFP was used as inoculum, and nodules were collected at 4 wpi. The images shown in FIGS. 6A-6H are representative images from multiple replicates.

[0041] FIGS. 7A and 7B show nifH expression is induced in M. truncatula ProNIN_{CE-5kb}:NIN transgenic nin-1 root nodules when they are inoculated with S. meliloti carrying the PronifH:GFP reporter. FIG. 7A shows a confocal image of a 4 wpi transgenic nodule, which shows that nifH (light grey) is switched on in the fixation zone (FX) (IF=infection zone; scale bar 200 μm). FIG. 7B shows a close-up image of FIG. 7A showing nifH switched on in fixation zone (S=symbiosome; scale bar 50 μm). The images shown in FIGS. 7A-7B are representative images from multiple replicates.

[0042] FIGS. 8A-8B show qRT-PCR analysis of relative NIN and NF-YA1 expression in response to cytokinin induction as compared to a water control in A17 WT and daphne-like. FIG. 8A shows qRT-PCR analysis of relative expression of NIN in A17 WT and daphne-like after application of 10-7 M benzylaminopurine (BAP; indicated by the label “10⁻⁷ BAP”) for cytokinin induction or water (indicated by the label “H₂O”) as a control for 16 hours. FIG. 8B shows qRT-PCR analysis of relative expression of NF-YA1 in A17 WT and daphne-like after application of 10-7 M BAP for cytokinin induction or water as a control for 16 hours. FIGS. 8A-8B show means of three biological replicates with error bars indicating SEM.

[0043] FIGS. 9A-9C show the phenotype of M. truncatula nin-1 mutant roots transformed with ProNIN_{CE(ΔD1/D2/D3)-5kb}:NIN constructs. FIG. 9A shows a longitudinal section of inoculated nin-1 root transformed with ProNIN_{CE(ΔD1)-5kb}:NIN (scale bar 50 μm; ep=epidermis; C4=cortical cell layer 4; C5=cortical cell layer 5; ed=endodermis; pc=pericycle; infection thread indicated by arrow). FIG. 9B shows a longitudinal section of inoculated nin-1 root transformed with ProNIN_{CE(ΔD2)-5kb}:NIN (IF=infection zone; FX=fixation zone; M=meristem; scale bar 200 μm). FIG. 9C shows nodule sections of nin-1 transformed with ProNIN_{CE(ΔD3)-5kb}:NIN (IF=infection zone; FX=fixation zone; scale bar 200 μm). Sections in FIGS. 9A-9C are stained with toluidine blue. The images shown in FIGS. 9A-9C are representative images from multiple replicates.

[0044] FIGS. 10A-10E show NIN and NF-YA1 expression patterns in M. truncatula A17 WT nodule primordia and daphne-like mutant primordia inoculated with S. meliloti RCR2011. FIGS. 10A-10B show RNA in situ localization of NIN (FIG. 10A) and NF-YA1 (FIG. 10B) in A17 nodule primordia at a stage of nodule primordium development in which the pericycle cells had divided and some anticlinal divisions had occurred in the inner cortical cell layers (C4 and C5). FIGS. 10C-10D show RNA in situ localization of NIN (FIG. 10C) and NF-YA1 (FIG. 10D) in A17 nodule primordia at a later stage of nodule primordium development when cortical cells had divided more extensively. FIG. 10E shows RNA in situ localization of NIN in daphne-like mutant primordia at two days post inoculation with S. meliloti RCR2011. In FIGS. 10A-10E, hybridization signals are depicted as dark dots and indicated by arrow heads, arrows indicate infection threads (scale bar 50 μm; ep=epidermis; C4=cortical cell layer 4; C5=cortical cell layer 5; ed=endodermis; pc=pericycle). The images shown in FIGS. 10A-10E are representative images from multiple replicates.

[0045] FIGS. 11A-11F show the CE region is required for rhizobium-induced NIN expression in the pericycle 48 hours post inoculation with S. meliloti RCR2011. FIGS. 11A-11B show M. truncatula A17 WT roots transformed with ProNIN_{5kb}:GUS (FIG. 11A) and ProNIN_{CE-5kb}:GUS (FIG. 11B). In FIGS. 11A-11B, GUS expression is in the epidermis, the endodermis, and the pericycle, and is indicated by arrowheads (lower GUS expression is also in some cortical cells; not indicated by arrowheads). FIGS. 11C-11D show M. truncatula daphne-like mutant roots transformed with ProNIN_{5kb}:GUS (FIG. 11C) and ProNIN_{CE-5kb}:GUS (FIG. 11D). In FIG. 11C, GUS expression is in the epidermis and the outer cortex, and is indicated by arrowheads. In FIG. 11D, GUS expression is in the epidermis, the outer cortex, and the pericycle (weaker expression in the pericycle), and is indicated by arrowheads. FIGS. 11E-11F show M. truncatula nin-1 mutant roots transformed with ProNIN_{5kb}:GUS (FIG. 11E) and ProNIN_{CE-5kb}:GUS (FIG. 11F). In FIGS. 11E-11F, GUS expression is in the epidermis and the outer cortex, and is indicated by arrowheads. In FIGS. 11A-11F, scale bar 50 μm; ep=epidermis; C4=cortical cell layer 4; C5=cortical cell layer 5; ed=endodermis; pc=pericycle). The images shown in FIGS. 11A-11F are representative images from multiple replicates.

[0046] FIGS. 12A and 12B show CRE1 and RR1 RNA localization in non-inoculated M. truncatula A17 WT roots. FIG. 12A shows RNA in situ localization of CRE1 in non-inoculated roots, where hybridization signals are depicted as dark dots and indicated by arrow heads (scale bar 50 μm; ep=epidermis; C4=cortical cell layer 4; C5=cortical cell layer 5; ed=endodermis; pc=pericycle; vb=vascular bundle). FIG. 12B shows RNA in situ localization of RR1 in non-inoculated roots, where hybridization signals are depicted as dark dots and indicated by arrow heads (scale bar 50 μm; ep=epidermis; C4=cortical cell layer 4; C5=cortical cell layer 5; ed=endodermis; pc=pericycle; vb=vascular bundle). The images shown in FIGS. 12A-12B are representative images from multiple replicates.

[0047] FIG. 13 shows a model for NIN function during nodule primordium initiation. The bacterial colony is shown as a grey dot in the curl of the root hair, whereas the infection thread is shown as a light grey line in the shaft of the root hair (root hair is depicted as vertical protrusion from the epidermis of the cell). The annotations “−2.2 Kb” and “−5 Kb” denote portions of the NIN 5′-upstream region (ep=epidermis; C4=cortical cell layer 4; C5=cortical cell layer 5; ed=endodermis; pc=pericycle).

### DETAILED DESCRIPTION

[0048] The following description sets forth exemplary methods, parameters, and the like. It should be recognized, however, that such description is not intended as a limitation on the scope of the present disclosure but is instead provided as a description of exemplary embodiments.

### Genetically Altered Plants and Seeds

[0049] An aspect of the disclosure includes a genetically altered plant, wherein the plant or a part thereof includes one or more genetic alterations that increase activity of a NODULE INCEPTION (NIN) protein or a NIN-like protein (NLP protein) in response to cytokinin signaling as compared to a wild type (WT) plant without the one or more genetic alterations, and wherein the plant or the part thereof includes a nucleic acid encoding the NIN protein or the NLP protein. An additional embodiment of this aspect includes the one or more genetic alterations being addition of one or more, two or more, three or more, four or more, five or more, six or more, seven or more, eight or more, nine or more, ten or more, eleven or more, twelve or more, thirteen or more, fourteen or more, fifteen or more, sixteen or more, seventeen or more, eighteen or more, nineteen or more, twenty or more, twenty-one or more, twenty-two or more, twenty-three or more, or twenty-four or more cytokinin response elements operably linked to the nucleic acid encoding the NIN protein or the NLP protein. Still another embodiment of this aspect includes the one or more genetic alterations being eight or more, sixteen or more, or twenty-four or more cytokinin response elements operably linked to the nucleic acid encoding the NIN protein or the NLP protein. Yet another embodiment of this aspect includes at least one of the cytokinin response elements being a B-type cytokinin signaling RESPONSE REGULATOR (RR) binding site. A further embodiment of this aspect includes at least one of the B-type cytokinin signaling RR binding sites having the sequence of SEQ ID NO:613 or SEQ ID NO:614. Yet another embodiment of this aspect includes at least one of the B-type cytokinin signaling RR binding sites having the sequence of SEQ ID NO:679, SEQ ID NO:680, SEQ ID NO:681, SEQ ID NO:682, SEQ ID NO:683, SEQ ID NO:684, SEQ ID NO:685, or SEQ ID NO:686. Still another embodiment of this aspect includes at least one of the B-type cytokinin signaling RR binding sites having the sequence selected from the group of SEQ ID NO:551, SEQ ID NO:552, SEQ ID NO:553, SEQ ID NO:554, SEQ ID NO:555, SEQ ID NO:556, SEQ ID NO:557, SEQ ID NO:558, SEQ ID NO:559, SEQ ID NO:560, SEQ ID NO:561, SEQ ID NO:562, SEQ ID NO:563, SEQ ID NO:564, SEQ ID NO:565, SEQ ID NO:566, SEQ ID NO:567, SEQ ID NO:568, SEQ ID NO:569, SEQ ID NO:570, SEQ ID NO:571, SEQ ID NO:572, SEQ ID NO:573, SEQ ID NO:574, SEQ ID NO:575, SEQ ID NO:576, SEQ ID NO:577, SEQ ID NO:578, SEQ ID NO:579, SEQ ID NO:580, SEQ ID NO:581, SEQ ID NO:582, SEQ ID NO:583, SEQ ID NO:584, SEQ ID NO:585, SEQ ID NO:586, SEQ ID NO:587, SEQ ID NO:588, SEQ ID NO:589, SEQ ID NO:590, SEQ ID NO:591, SEQ ID NO:592, SEQ ID NO:593, SEQ ID NO:594, SEQ ID NO:595, SEQ ID NO:596, SEQ ID NO:597, SEQ ID NO:598, SEQ ID NO:599, SEQ ID NO:600, SEQ ID NO:601, SEQ ID NO:602, SEQ ID NO:603, SEQ ID NO:604, SEQ ID NO:605, SEQ ID NO:606, SEQ ID NO:607, SEQ ID NO:608, SEQ ID NO:609, SEQ ID NO:610, SEQ ID NO:611, SEQ ID NO:612, SEQ ID NO:615, SEQ ID NO:616, SEQ ID NO:617, SEQ ID NO:618, SEQ ID NO:619, SEQ ID NO:620, SEQ ID NO:621, SEQ ID NO:622, SEQ ID NO:623, SEQ ID NO:624, SEQ ID NO:625, SEQ ID NO:626, SEQ ID NO:679, SEQ ID NO:680, SEQ ID NO:681, SEQ ID NO:682, SEQ ID NO:683, SEQ ID NO:684, SEQ ID NO:685, or SEQ ID NO:686. An additional embodiment of this aspect includes the cytokinin response elements being oriented in tandem or being oriented inversely.

[0050] In yet another embodiment, which may be combined with any of the preceding embodiments, the cytokinin response elements are within 100 nucleotides, within 95 nucleotides, within 90 nucleotides, within 85 nucleotides, within 80 nucleotides, within 75 nucleotides, within 70 nucleotides, within 65 nucleotides, within 60 nucleotides, within 59 nucleotides, within 58 nucleotides, within 57 nucleotides, within 56 nucleotides, within 55 nucleotides, within 54 nucleotides, within 53 nucleotides, within 52 nucleotides, within 51 nucleotides, within 50 nucleotides, within 49 nucleotides, within 48 nucleotides, within 47 nucleotides, within 46 nucleotides, within 45 nucleotides, within 44 nucleotides, within 43 nucleotides, within 42 nucleotides, within 41 nucleotides, within 40 nucleotides, within 39 nucleotides, within 38 nucleotides, within 37 nucleotides, within 36 nucleotides, within 35 nucleotides, within 34 nucleotides, within 33 nucleotides, within 32 nucleotides, within 31 nucleotides, within 30 nucleotides, within 29 nucleotides, within 28 nucleotides, within 27 nucleotides, within 26 nucleotides, within 25 nucleotides, within 24 nucleotides, within 23 nucleotides, within 22 nucleotides, within 21 nucleotides, within 20 nucleotides, within 19 nucleotides, within 18 nucleotides, within 17 nucleotides, within 16 nucleotides, within 15 nucleotides, within 14 nucleotides, within 13 nucleotides, within 12 nucleotides, within 11 nucleotides, within 10 nucleotides, within 9 nucleotides, within 8 nucleotides, within 7 nucleotides, within 6 nucleotides, within 5 nucleotides, within 4 nucleotides, within 3 nucleotides, within 2 nucleotides, or within 1 nucleotide of each other. In an additional embodiment of this aspect, the cytokinin response elements are within 11 nucleotides, within 10 nucleotides, within 9 nucleotides, within 8 nucleotides, within 7 nucleotides, within 6 nucleotides, within 5 nucleotides, within 4 nucleotides, within 3 nucleotides, within 2 nucleotides, or within 1 nucleotide of each other. In yet another embodiment, which may be combined with any of the preceding embodiments, the nucleic acid encoding the NIN protein or the NLP protein is operably linked to a promoter that is operably linked to the cytokinin response elements. In an additional embodiment of this aspect, the promoter and the cytokinin response elements are within 110,000 nucleotides, within 109,000 nucleotides, within 108,000 nucleotides, within 107,000 nucleotides, within 106,000 nucleotides, within 105,000 nucleotides, within 104,000 nucleotides, within 103,000 nucleotides, within 102,000 nucleotides, within 101,000 nucleotides, within 100,000 nucleotides, within 99,000 nucleotides, within 98,000 nucleotides, within 97,000 nucleotides, within 96,000 nucleotides, within 95,000 nucleotides, within 94,000 nucleotides, within 93,000 nucleotides, within 92,000 nucleotides, within 91,000 nucleotides, within 90,000 nucleotides, within 89,000 nucleotides, within 88,000 nucleotides, within 87,000 nucleotides, within 86,000 nucleotides, within 85,000 nucleotides, within 84,000 nucleotides, within 83,000 nucleotides, within 82,000 nucleotides, within 81,000 nucleotides, within 80,000 nucleotides, within 79,000 nucleotides, within 78,000 nucleotides, within 77,000 nucleotides, within 76,000 nucleotides, within 75,000 nucleotides, within 74,000 nucleotides, within 73,000 nucleotides, within 72,000 nucleotides, within 71,000 nucleotides, within 70,000 nucleotides, within 69,000 nucleotides, within 68,000 nucleotides, within 67,000 nucleotides, within 66,000 nucleotides, within 65,000 nucleotides, within 64,000 nucleotides, within 63,000 nucleotides, within 62,000 nucleotides, within 61,000 nucleotides, within 60,000 nucleotides, within 59,000 nucleotides, within 58,000 nucleotides, within 57,000 nucleotides, within 56,000 nucleotides, within 55,000 nucleotides, within 54,000 nucleotides, within 53,000 nucleotides, within 52,000 nucleotides, within 51,000 nucleotides, within 50,000 nucleotides, within 49,000 nucleotides, within 48,000 nucleotides, within 47,000 nucleotides, within 46,000 nucleotides, within 45,000 nucleotides, within 44,000 nucleotides, within 43,000 nucleotides, within 42,000 nucleotides, within 41,000 nucleotides, within 40,000 nucleotides, within 39,000 nucleotides, within 38,000 nucleotides, within 37,000 nucleotides, within 36,000 nucleotides, within 35,000 nucleotides, within 34,000 nucleotides, within 33,000 nucleotides, within 32,000 nucleotides, within 31,000 nucleotides, within 30,000 nucleotides, within 29,000 nucleotides, within 28,000 nucleotides, within 27,000 nucleotides, within 26,000 nucleotides, within 25,000 nucleotides, within 24,000 nucleotides, within 23,000 nucleotides, within 22,000 nucleotides, within 21,000 nucleotides, within 20,000 nucleotides, within 19,000 nucleotides, within 18,000 nucleotides, within 17,000 nucleotides, within 16,000 nucleotides, within 15,000 nucleotides, within 14,000 nucleotides, within 13,000 nucleotides, within 12,000 nucleotides, within 11,000 nucleotides, within 10,000 nucleotides, within 9,000 nucleotides, within 8,000 nucleotides, within 7,000 nucleotides, within 6,000 nucleotides, within 5,000 nucleotides, within 4,000 nucleotides, within 3,000 nucleotides, within 2,000 nucleotides, within 1,000 nucleotides, within 900 nucleotides, within 800 nucleotides, within 700 nucleotides, within 600 nucleotides, within 500 nucleotides, within 400 nucleotides, within 300 nucleotides, within 200 nucleotides, or within 100 nucleotides of each other. Yet another embodiment of this aspect includes the cytokinin response elements being located upstream of the nucleic acid encoding the NIN protein or the NLP protein. Still another embodiment of this aspect includes the cytokinin response elements being placed between the end of the coding sequence of a 5′-upstream located gene and the transcriptional or translational start site of the nucleic acid encoding the NIN protein or the NLP protein. A further embodiment of this aspect includes the cytokinin response elements being located within the nucleic acid encoding the NIN protein or the NLP protein (i.e., within the transcribed gene sequence). An additional embodiment of this aspect includes the cytokinin response elements being located within one or more introns of the nucleic acid encoding the NIN protein or the NLP protein.

[0051] Still another embodiment of this aspect that can be combined with any of the preceding embodiments includes the nucleic acid encoding a NIN/NLP1 orthogroup protein. An additional embodiment of this aspect includes the NIN/NLP1 orthogroup protein having at least 70% sequence identity, at least 71% sequence identity, at least 72% sequence identity, at least 73% sequence identity, at least 74% sequence identity, at least 75% sequence identity, at least 76% sequence identity, at least 77% sequence identity, at least 78% sequence identity, at least 79% sequence identity, at least 80% sequence identity, at least 81% sequence identity, at least 82% sequence identity, at least 83% sequence identity, at least 84% sequence identity, at least 85% sequence identity, at least 86% sequence identity, at least 87% sequence identity, at least 88% sequence identity, at least 89% sequence identity, at least 90% sequence identity, at least 91% sequence identity, at least 92% sequence identity, at least 93% sequence identity, at least 94% sequence identity, at least 95% sequence identity, at least 96% sequence identity, at least 97% sequence identity, at least 98% sequence identity, or at least 99% sequence identity to an amino acid sequence selected from the group of SEQ ID NO:1, SEQ ID NO:2, SEQ ID NO:3, SEQ ID NO:4, SEQ ID NO:5, SEQ ID NO:6, SEQ ID NO:8, SEQ ID NO:9, SEQ ID NO:10, SEQ ID NO:11, SEQ ID NO:12, SEQ ID NO:13, SEQ ID NO:14, SEQ ID NO:15, SEQ ID NO:16, SEQ ID NO:17, SEQ ID NO:18, SEQ ID NO:19, SEQ ID NO:20, SEQ ID NO:21, SEQ ID NO:22; SEQ ID NO:23, SEQ ID NO:24, SEQ ID NO:25, SEQ ID NO:26, SEQ ID NO:27, SEQ ID NO:28, SEQ ID NO:29, SEQ ID NO:30, SEQ ID NO:31, SEQ ID NO:32, SEQ ID NO:33, SEQ ID NO:34, SEQ ID NO:35, SEQ ID NO:36, SEQ ID NO:37, SEQ ID NO:38, SEQ ID NO:39, SEQ ID NO:40, SEQ ID NO:41, SEQ ID NO:42, SEQ ID NO:43, SEQ ID NO:44, SEQ ID NO:45, SEQ ID NO:46, SEQ ID NO:47, SEQ ID NO:48, SEQ ID NO:49, SEQ ID NO:50, SEQ ID NO:51, SEQ ID NO:52, SEQ ID NO:53, SEQ ID NO:54, SEQ ID NO:55, SEQ ID NO:56, SEQ ID NO:57, SEQ ID NO:58, SEQ ID NO:59, SEQ ID NO:60, SEQ ID NO:61, SEQ ID NO:62, SEQ ID NO:63, SEQ ID NO:64, SEQ ID NO:65, SEQ ID NO:66, SEQ ID NO:67, SEQ ID NO:68, SEQ ID NO:69, SEQ ID NO:70, SEQ ID NO:71, SEQ ID NO:72, SEQ ID NO:73, SEQ ID NO:74, SEQ ID NO:75, SEQ ID NO:76, SEQ ID NO:77, SEQ ID NO:78, SEQ ID NO:79, SEQ ID NO:80, SEQ ID NO:81, SEQ ID NO:82, SEQ ID NO:83, SEQ ID NO:84, SEQ ID NO:85, SEQ ID NO:86, SEQ ID NO:87, SEQ ID NO:88, SEQ ID NO:89, SEQ ID NO:90, SEQ ID NO:91, SEQ ID NO:92, SEQ ID NO:93, SEQ ID NO:94, SEQ ID NO:95, SEQ ID NO:96, SEQ ID NO:98, SEQ ID NO:99, SEQ ID NO:100, SEQ ID NO:101, SEQ ID NO:102, SEQ ID NO:103, SEQ ID NO:104, SEQ ID NO:105, SEQ ID NO:106, SEQ ID NO:108, SEQ ID NO:109, SEQ ID NO:131, SEQ ID NO:132, SEQ ID NO:133, SEQ ID NO:134, SEQ ID NO:135, SEQ ID NO:136, SEQ ID NO:137, SEQ ID NO:138, SEQ ID NO:139, SEQ ID NO:140, SEQ ID NO:141, SEQ ID NO:142, SEQ ID NO:143, SEQ ID NO:144, SEQ ID NO:145, SEQ ID NO:146, SEQ ID NO:147, SEQ ID NO:148, SEQ ID NO:149, SEQ ID NO:150, SEQ ID NO:151, SEQ ID NO:152, SEQ ID NO:153, SEQ ID NO:154, SEQ ID NO:155, SEQ ID NO:156, SEQ ID NO:157, SEQ ID NO:158, SEQ ID NO:159, SEQ ID NO:160, SEQ ID NO:161, SEQ ID NO:162, SEQ ID NO:163, SEQ ID NO:164, SEQ ID NO:165, SEQ ID NO:166, SEQ ID NO:167, SEQ ID NO:168, SEQ ID NO:169, SEQ ID NO:170, SEQ ID NO:171, SEQ ID NO:172, SEQ ID NO:173, SEQ ID NO:174, SEQ ID NO:175, SEQ ID NO:177, SEQ ID NO:178, SEQ ID NO:179, SEQ ID NO:180, SEQ ID NO:181, SEQ ID NO:182, SEQ ID NO:183, SEQ ID NO:184, SEQ ID NO:185, SEQ ID NO:186, SEQ ID NO:187, SEQ ID NO:188, SEQ ID NO:189, SEQ ID NO:190, SEQ ID NO:191, SEQ ID NO:192, SEQ ID NO:193, SEQ ID NO:194, SEQ ID NO:196, SEQ ID NO:197, SEQ ID NO:198, SEQ ID NO:199, SEQ ID NO:200, SEQ ID NO:201, SEQ ID NO:202, SEQ ID NO:203, SEQ ID NO:204, SEQ ID NO:205, SEQ ID NO:206, SEQ ID NO:207, SEQ ID NO:208, SEQ ID NO:209, SEQ ID NO:210, SEQ ID NO:211, SEQ ID NO:212, SEQ ID NO:213, SEQ ID NO:214, SEQ ID NO:215, SEQ ID NO:216, SEQ ID NO:217, SEQ ID NO:218, SEQ ID NO:219, SEQ ID NO:220, SEQ ID NO:221, SEQ ID NO:222, SEQ ID NO:223, SEQ ID NO:224, SEQ ID NO:225, SEQ ID NO:226, SEQ ID NO:227, SEQ ID NO:228, SEQ ID NO:229, SEQ ID NO:230, SEQ ID NO:231, SEQ ID NO:232, SEQ ID NO:233, SEQ ID NO:234, SEQ ID NO:235, SEQ ID NO:236, SEQ ID NO:687, SEQ ID NO:688, SEQ ID NO:689, SEQ ID NO:690, SEQ ID NO:691, SEQ ID NO:692, or SEQ ID NO:693. A further embodiment of this aspect includes the NIN/NLP1 orthogroup protein being a NIN protein and having at least at least 70% sequence identity, at least 71% sequence identity, at least 72% sequence identity, at least 73% sequence identity, at least 74% sequence identity, at least 75% sequence identity, at least 76% sequence identity, at least 77% sequence identity, at least 78% sequence identity, at least 79% sequence identity, at least 80% sequence identity, at least 81% sequence identity, at least 82% sequence identity, at least 83% sequence identity, at least 84% sequence identity, at least 85% sequence identity, at least 86% sequence identity, at least 87% sequence identity, at least 88% sequence identity, at least 89% sequence identity, at least 90% sequence identity, at least 91% sequence identity, at least 92% sequence identity, at least 93% sequence identity, at least 94% sequence identity, at least 95% sequence identity, at least 96% sequence identity, at least 97% sequence identity, at least 98% sequence identity, or at least 99% sequence identity to an amino acid sequence selected from the group of SEQ ID NO:22 (i.e., CsaNIN; Cannabis sativa), SEQ ID NO:78 (i.e., HluNIN; Humulus lupulus), SEQ ID NO:89 (i.e., LjNIN; Lotus japonicus), SEQ ID NO:108 (i.e., MtNIN; Medicago truncatula); SEQ ID NO:136 (i.e., PanNIN; Parasponia andersonii), SEQ ID NO:139 (i.e., PriNIN; Parasponia rigida), SEQ ID NO:142 (i.e., PruNIN; Parasponia rugosa), SEQ ID NO:185 (i.e., TleNIN; Trema levigata; truncated version of NIN), SEQ ID NO:187 (i.e., TorNIN; Trema orientalis; truncated version of NIN), SEQ ID NO:190 (i.e., TtoNIN; Trema tomentosa; truncated version of NIN), SEQ ID NO:236 (i.e., ZjuNIN; Ziziphus jujuba), SEQ ID NO:687 (i.e., AglNIN; Alnus glutinosa), SEQ ID NO:688 (i.e., CglNIN; Casuarina glauca), SEQ ID NO:689 (i.e., DglNIN.1; Datisca glomerata), SEQ ID NO:690 (i.e., DglNIN.2; Datisca glomerata), SEQ ID NO:691 (i.e., DtrNIN; Discaria trinervis), SEQ ID NO:692 (i.e., DdrNIN; Dryas drummondii), or SEQ ID NO:693 (i.e., PtrNIN; Purshia tridentata). Another embodiment of this aspect includes the NIN/NLP1 orthogroup protein being a NIN protein and having at least at least 70% sequence identity, at least 71% sequence identity, at least 72% sequence identity, at least 73% sequence identity, at least 74% sequence identity, at least 75% sequence identity, at least 76% sequence identity, at least 77% sequence identity, at least 78% sequence identity, at least 79% sequence identity, at least 80% sequence identity, at least 81% sequence identity, at least 82% sequence identity, at least 83% sequence identity, at least 84% sequence identity, at least 85% sequence identity, at least 86% sequence identity, at least 87% sequence identity, at least 88% sequence identity, at least 89% sequence identity, at least 90% sequence identity, at least 91% sequence identity, at least 92% sequence identity, at least 93% sequence identity, at least 94% sequence identity, at least 95% sequence identity, at least 96% sequence identity, at least 97% sequence identity, at least 98% sequence identity, or at least 99% sequence identity to an amino acid sequence selected from the group of SEQ ID NO:89 (i.e., LjNIN; Lotus japonicus) or SEQ ID NO:108 (i.e., MtNIN; Medicago truncatula).

[0052] Yet another embodiment of this aspect that can be combined with any of the preceding embodiments includes the nucleic acid encoding a NLP2-3 orthogroup protein, a NLP4 orthogroup protein, or a basal NIN/NLP orthogroup protein. An additional embodiment of this aspect includes the NLP2-3 orthogroup protein having at least 70% sequence identity, at least 71% sequence identity, at least 72% sequence identity, at least 73% sequence identity, at least 74% sequence identity, at least 75% sequence identity, at least 76% sequence identity, at least 77% sequence identity, at least 78% sequence identity, at least 79% sequence identity, at least 80% sequence identity, at least 81% sequence identity, at least 82% sequence identity, at least 83% sequence identity, at least 84% sequence identity, at least 85% sequence identity, at least 86% sequence identity, at least 87% sequence identity, at least 88% sequence identity, at least 89% sequence identity, at least 90% sequence identity, at least 91% sequence identity, at least 92% sequence identity, at least 93% sequence identity, at least 94% sequence identity, at least 95% sequence identity, at least 96% sequence identity, at least 97% sequence identity, at least 98% sequence identity, or at least 99% sequence identity to an amino acid sequence selected from the group of SEQ ID NO:237, SEQ ID NO:238, SEQ ID NO:239, SEQ ID NO:241, SEQ ID NO:242, SEQ ID NO:243, SEQ ID NO:244, SEQ ID NO:245, SEQ ID NO:246, SEQ ID NO:247, SEQ ID NO:248, SEQ ID NO:250, SEQ ID NO:251, SEQ ID NO:252, SEQ ID NO:253, SEQ ID NO:254, SEQ ID NO:255, SEQ ID NO:256, SEQ ID NO:257, SEQ ID NO:258, SEQ ID NO:259, SEQ ID NO:260, SEQ ID NO:261, SEQ ID NO:262, SEQ ID NO:263, SEQ ID NO:264, SEQ ID NO:265, SEQ ID NO:266, SEQ ID NO:267, SEQ ID NO:268, SEQ ID NO:269, SEQ ID NO:270, SEQ ID NO:271, SEQ ID NO:273, SEQ ID NO:274, SEQ ID NO:275, SEQ ID NO:276, SEQ ID NO:277, SEQ ID NO:278, SEQ ID NO:279, SEQ ID NO:280, SEQ ID NO:281, SEQ ID NO:282, SEQ ID NO:283, SEQ ID NO:284, SEQ ID NO:285, SEQ ID NO:286, SEQ ID NO:287, SEQ ID NO:288, SEQ ID NO:289, SEQ ID NO:290, SEQ ID NO:291, SEQ ID NO:292, SEQ ID NO:293, SEQ ID NO:294, SEQ ID NO:295, SEQ ID NO:296, SEQ ID NO:297, SEQ ID NO:298, SEQ ID NO:299, SEQ ID NO:300, SEQ ID NO:301, SEQ ID NO:302, SEQ ID NO:303, SEQ ID NO:304, SEQ ID NO:305, SEQ ID NO:306, SEQ ID NO:307, SEQ ID NO:308, SEQ ID NO:309, SEQ ID NO:310, SEQ ID NO:311, SEQ ID NO:312, SEQ ID NO:313, SEQ ID NO:314, SEQ ID NO:315, SEQ ID NO:316, SEQ ID NO:317, SEQ ID NO:318, SEQ ID NO:319, SEQ ID NO:320, SEQ ID NO:321, SEQ ID NO:322, SEQ ID NO:323, SEQ ID NO:324, SEQ ID NO:325, SEQ ID NO:326, SEQ ID NO:327, SEQ ID NO:328, SEQ ID NO:329, SEQ ID NO:332, SEQ ID NO:333, SEQ ID NO:334, SEQ ID NO:335, SEQ ID NO:336, SEQ ID NO:337, SEQ ID NO:338, SEQ ID NO:339, SEQ ID NO:340, SEQ ID NO:341, SEQ ID NO:342, SEQ ID NO:343, SEQ ID NO:344, SEQ ID NO:345, SEQ ID NO:346, SEQ ID NO:347, SEQ ID NO:348, SEQ ID NO:349, SEQ ID NO:350, SEQ ID NO:351, SEQ ID NO:352, SEQ ID NO:353, SEQ ID NO:354, SEQ ID NO:355, SEQ ID NO:356, SEQ ID NO:357, SEQ ID NO:358, SEQ ID NO:359, SEQ ID NO:360, SEQ ID NO:361, SEQ ID NO:362, SEQ ID NO:363, SEQ ID NO:364, SEQ ID NO:365, SEQ ID NO:366, SEQ ID NO:367, SEQ ID NO:368, SEQ ID NO:369, SEQ ID NO:371, SEQ ID NO:372, SEQ ID NO:373, SEQ ID NO:374, SEQ ID NO:375, SEQ ID NO:376, and SEQ ID NO:377. Yet another embodiment of this aspect includes the NLP4 orthogroup protein having at least 70% sequence identity, at least 71% sequence identity, at least 72% sequence identity, at least 73% sequence identity, at least 74% sequence identity, at least 75% sequence identity, at least 76% sequence identity, at least 77% sequence identity, at least 78% sequence identity, at least 79% sequence identity, at least 80% sequence identity, at least 81% sequence identity, at least 82% sequence identity, at least 83% sequence identity, at least 84% sequence identity, at least 85% sequence identity, at least 86% sequence identity, at least 87% sequence identity, at least 88% sequence identity, at least 89% sequence identity, at least 90% sequence identity, at least 91% sequence identity, at least 92% sequence identity, at least 93% sequence identity, at least 94% sequence identity, at least 95% sequence identity, at least 96% sequence identity, at least 97% sequence identity, at least 98% sequence identity, or at least 99% sequence identity to an amino acid sequence selected from the group of SEQ ID NO:378, SEQ ID NO:379, SEQ ID NO:380, SEQ ID NO:381, SEQ ID NO:382, SEQ ID NO:383, SEQ ID NO:384, SEQ ID NO:385, SEQ ID NO:386, SEQ ID NO:387, SEQ ID NO:388, SEQ ID NO:389, SEQ ID NO:390, SEQ ID NO:391, SEQ ID NO:392, SEQ ID NO:393, SEQ ID NO:394, SEQ ID NO:395, SEQ ID NO:396, SEQ ID NO:397, SEQ ID NO:398, SEQ ID NO:399, SEQ ID NO:400, SEQ ID NO:401, SEQ ID NO:402, SEQ ID NO:403, SEQ ID NO:404, SEQ ID NO:405, SEQ ID NO:406, SEQ ID NO:408, SEQ ID NO:409, SEQ ID NO:410, SEQ ID NO:411, SEQ ID NO:412, SEQ ID NO:413, SEQ ID NO:414, SEQ ID NO:415, SEQ ID NO:417, SEQ ID NO:418, SEQ ID NO:419, SEQ ID NO:420, SEQ ID NO:421, SEQ ID NO:422, SEQ ID NO:423, SEQ ID NO:424, SEQ ID NO:425, SEQ ID NO:426, SEQ ID NO:427, SEQ ID NO:428, SEQ ID NO:429, SEQ ID NO:430, SEQ ID NO:431, SEQ ID NO:432, SEQ ID NO:433, SEQ ID NO:434, SEQ ID NO:435, SEQ ID NO:436, SEQ ID NO:437, SEQ ID NO:438, SEQ ID NO:439, SEQ ID NO:440, SEQ ID NO:441, SEQ ID NO:442, SEQ ID NO:443, SEQ ID NO:444, SEQ ID NO:445, SEQ ID NO:446, SEQ ID NO:447, SEQ ID NO:448, SEQ ID NO:449, SEQ ID NO:450, SEQ ID NO:451, SEQ ID NO:452, SEQ ID NO:453, SEQ ID NO:455, SEQ ID NO:456, SEQ ID NO:457, SEQ ID NO:458, SEQ ID NO:459, SEQ ID NO:460, SEQ ID NO:461, SEQ ID NO:462, SEQ ID NO:463, SEQ ID NO:464, SEQ ID NO:465, SEQ ID NO:466, SEQ ID NO:467, SEQ ID NO:468, SEQ ID NO:469, SEQ ID NO:470, SEQ ID NO:471, SEQ ID NO:472, SEQ ID NO:473, SEQ ID NO:474, SEQ ID NO:475, SEQ ID NO:476, SEQ ID NO:477, SEQ ID NO:478, SEQ ID NO:479, SEQ ID NO:480, SEQ ID NO:481, SEQ ID NO:482, SEQ ID NO:483, SEQ ID NO:484, SEQ ID NO:485, SEQ ID NO:486, SEQ ID NO:487, SEQ ID NO:488, SEQ ID NO:489, SEQ ID NO:490, SEQ ID NO:491, SEQ ID NO:492, SEQ ID NO:493, SEQ ID NO:494, SEQ ID NO:495, SEQ ID NO:496, SEQ ID NO:497, SEQ ID NO:498, SEQ ID NO:499, SEQ ID NO:500, SEQ ID NO:501, SEQ ID NO:502, SEQ ID NO:504, SEQ ID NO:505, SEQ ID NO:506, SEQ ID NO:507, SEQ ID NO:508, SEQ ID NO:509, SEQ ID NO:510, SEQ ID NO:511, SEQ ID NO:512, SEQ ID NO:513, SEQ ID NO:514, SEQ ID NO:515, SEQ ID NO:516, SEQ ID NO:517, SEQ ID NO:518, SEQ ID NO:519, SEQ ID NO:520, SEQ ID NO:521, SEQ ID NO:522, SEQ ID NO:523, and SEQ ID NO:524. A further embodiment of this aspect includes the basal NIN/NLP orthogroup protein having at least 70% sequence identity, at least 71% sequence identity, at least 72% sequence identity, at least 73% sequence identity, at least 74% sequence identity, at least 75% sequence identity, at least 76% sequence identity, at least 77% sequence identity, at least 78% sequence identity, at least 79% sequence identity, at least 80% sequence identity, at least 81% sequence identity, at least 82% sequence identity, at least 83% sequence identity, at least 84% sequence identity, at least 85% sequence identity, at least 86% sequence identity, at least 87% sequence identity, at least 88% sequence identity, at least 89% sequence identity, at least 90% sequence identity, at least 91% sequence identity, at least 92% sequence identity, at least 93% sequence identity, at least 94% sequence identity, at least 95% sequence identity, at least 96% sequence identity, at least 97% sequence identity, at least 98% sequence identity, or at least 99% sequence identity to an amino acid sequence selected from the group of SEQ ID NO:637, SEQ ID NO:638, SEQ ID NO:639, SEQ ID NO:640, SEQ ID NO:641, SEQ ID NO:642, SEQ ID NO:643, SEQ ID NO:644, SEQ ID NO:645, SEQ ID NO:646, SEQ ID NO:647, SEQ ID NO:648, SEQ ID NO:649, SEQ ID NO:650, SEQ ID NO:651, SEQ ID NO:652, SEQ ID NO:653, SEQ ID NO:654, SEQ ID NO:655, SEQ ID NO:656, SEQ ID NO:657, SEQ ID NO:658, SEQ ID NO:659, SEQ ID NO:660, SEQ ID NO:661, or SEQ ID NO:662.

[0053] In yet another embodiment, which may be combined with any of the preceding embodiments, the nucleic acid encoding the NIN protein or the NLP protein is endogenous. Still another embodiment of this aspect that can be combined with any of the preceding embodiments includes the nucleic acid encoding the NIN protein or the NLP protein being heterologous. Yet another embodiment of this present aspect that can be combined with any of the preceding aspects that has the nucleic acid encoding the NIN protein or the NLP protein operably linked to a promoter includes the promoter being endogenous. Still another embodiment of this aspect that can be combined with any of the preceding aspects that has the nucleic acid encoding the NIN protein or the NLP protein operably linked to a promoter includes the promoter being heterologous.

[0054] In still another embodiment, which may be combined with any of the preceding embodiments, cytokinin signaling or induction of the cytokinin signaling pathway in a root pericycle cell layer, an endodermis cell layer (i.e., endodermal cell layer), cortex cell layers (i.e., cortical cell layers), and/or an epidermis cell layer (i.e., epidermal cell layer) induces nodule organogenesis. An additional embodiment of this aspect includes the cytokinin signaling pathways being induced by cytokinin analogs that are exogenously applied or secreted by microbes. Still another embodiment of this aspect that can be combined with any of the preceding embodiments further includes one or more CYCLOPS response elements operably linked to the nucleic acid. CYCLOPS response elements of the present disclosure may be a full CYCLOPS response element or an essential CYCLOPS response element (CYC-box) as shown in FIG. 5D. An additional embodiment of this aspect includes CYCLOPS expression in a root epidermis cell layer (i.e., epidermal cell layer) inducing rhizobium infection.

[0055] In a further embodiment, which may be combined with any of the preceding embodiments, the genetically altered plant is a monocot. An additional embodiment of this aspect includes the genetically altered plant being selected from the group of corn (e.g., maize, Zea mays), rice (e.g., indica rice, japonica rice, aromatic rice, glutinous rice, Oryza sativa, Oryza glaberrima), wild rice (e.g., Zizania spp., Porteresia spp.), wheat (e.g., common wheat, spelt, durum, einkom, emmer, kamut, Triticum aestivum, Triticum spelta, Triticum durum, Triticum urartu, Triticum monococcum, Triticum turanicum, Triticum spp.), barley (e.g., Hordeum vulgare), sorghum (e.g., Sorghum bicolor), millet (e.g., finger millet, fonio millet, foxtail millet, pearl millet, barnyard millets, Eleusine coracana, Panicum sumatrense, Panicum milaceum, Setaria italica, Pennisetum glaucum, Digitaria spp., Echinocloa spp.), teff (e.g., Eragrostis tef), oat (e.g., Avena sativa), triticale (e.g., X Triticosecale Wittmack, Triticosecale schlanstedtense Triticosecale neoblaringhemii A. Camus, Triticosecale neoblaringhemii A. Camus), rye (e.g., Secale cereale, Secale cereanum), or sugar cane (e.g., Saccharum officinarum, Saccharum spp.). Still another embodiment of this aspect that can be combined with any of the preceding embodiments further includes the genetically altered plant being selected from the group of apple (e.g., Malus pumila, Malus x domestica, Pyrus malus), pear (e.g., Pyrus communis, Pyrus x bretschneideri, Pyrus pyrifolia, Pyrus sinkiangensis, Pyrus pashia, Pyrus spp.), plum (e.g., Mirabelle, greengage, damson, Prunus domestica, Prunus salicina, Prunus mume), apricot (e.g., Prunus armeniaca, Prunus brigantine, Prunus mandshurica), peach (e.g., Prunus persica), almond (e.g., Prunus dulcis, Prunus amygdalus), walnut (e.g., Persian walnut, English walnut, black walnut, Juglans regia, Juglans nigra, Juglans cinerea, Juglans californica), cherry (e.g., Prunus avium, Prunus cerasus, Prunus yedoensis var. nudiflora), strawberry (e.g., Fragaria x ananassa, Fragaria chiloensis, Fragaria virginiana, Fragaria vesca), raspberry (e.g., European red raspberry, black raspberry, Rubus idaeus L., Rubus occidentalis, Rubus strigosus), blackberry (e.g., evergreen blackberry, Himalayan blackberry, Rubus fruticosus, Rubus ursinus, Rubus laciniatus, Rubus argutus, Rubus armeniacus, Rubus plicatus, Rubus ulmifolius, Rubus allegheniensis, Rubus subgenus Eubatus sect. Moriferi & Ursini), red currant (e.g., white currant, Ribes rubrum), black currant (e.g., cassis, Ribes nigrum), gooseberry (e.g., Ribes uva-crispa, Ribes grossulari, Ribes hirtellum), melon (e.g., watermelon, winter melon, casabas, cantaloupe, honeydew, muskmelon, Citrullus lanatus, Benincasa hispida, Cucumis melo, Cucumis melo cantalupensis, Cucumis melo inodorus, Cucumis melo reticulatus), cucumber (e.g., slicing cucumbers, pickling cucumbers, English cucumber, Cucumis sativus), pumpkin (e.g., Cucurbita pepo, Cucurbita maxima), squash (e.g., gourd, Cucurbita argyrosperma, Cucurbita ficifolia, Cucurbita maxima, Cucurbita moschata), grape (e.g., Vitis vinifera, Vitis amurensis, Vitis labrusca, Vitis mustangensis, Vitis riparia, Vitis rotundifolia), hemp (e.g., cannabis, Cannabis sativa), hops (e.g., Humulus lupulus), birch (e.g., Betula spp.), beech (e.g., Fagus sylvatica, Fagus grandifolia, Fagus spp.), jujube (e.g., red date, Ziziphus jujube), cassava (e.g., manioc, yucca, Manihot esculenta), poplar (e.g., hybrid poplar, Populus trichocarpa, Populus tremula, Populus alba, Populus spp.), chestnut (e.g., Castanea mollissima, Castanea crenata, Castanea dentata, Castanea spp.), swamp oak (e.g., Casuarina glauca), rose gum (e.g., Eucalyptus grandis), oak (e.g., cork oak, Quercus suber, Quercus spp.), citrus (e.g., lemon, lime, orange, grapefruit, pomelo, citron, trifoliate orange, bergamot orange, bitter orange, blood orange, satsuma, clementine, mandarin, yuzu, finger lime, kaffir lime, kumquat, Citrus clementina, Citrus sinensis, Citrus trifoliata, Citrus japonica, Citrus maxima, Citrus australasica, Citrus reticulata, Citus aurantifolia, Citrus hystrix, Citrus x paradisi, Citrus x clementina, Citrus spp.), potato (e.g., russet potatoes, yellow potatoes, red potatoes, Solanum tuberosum), tomato (e.g., Solanum lycopersicum), sweet potato (e.g., Ipomoea batatas), yam (e.g., Diascorea spp., Oxalis tuberosa), Arabidopsis (e.g., Arabidopsis thaliana), Trema spp. (e.g., Trema cannabina, Trema cubense, Trema discolor, Trema domingensis, Trema integerrima, Trema lamarckiana, Trema micrantha, Trema orientalis, Trema philippinensis, Trema strigilosa, Trema tomentosa, Trema levigata), and Jatropha spp. (e.g., Jatropha curcas). In yet another embodiment, which may be combined with any of the preceding embodiments, the WT plant is not a legume, does not form nodules for symbiosis with nitrogen fixing bacteria, or both is not a legume and does not form nodules for symbiosis with nitrogen fixing bacteria.

[0056] Still another embodiment of this aspect that can be combined with any of the preceding embodiments includes a genetically altered plant part of the genetically altered plant of any one of the preceding embodiments, wherein the plant part is a leaf, a stem, a root, a tuber, a flower, a seed, a kernel, a grain, a fruit, a cell, or a portion thereof and the genetically altered plant part includes the one or more genetic alterations. An additional embodiment of this aspect includes the plant part being a fruit, a tuber, a kernel, or a grain. Yet another embodiment of this aspect that can be combined with any of the preceding embodiments includes a genetically altered pollen grain or a genetically altered ovule of the plant of any one of the preceding embodiments, wherein the genetically altered pollen grain or the genetically altered ovule includes the one or more genetic alterations. A further embodiment of this aspect that can be combined with any of the preceding embodiments includes a genetically altered protoplast produced from the genetically altered plant of any of the preceding embodiments, wherein the genetically altered protoplast includes the one or more genetic alterations. An additional embodiment of this aspect that can be combined with any of the preceding embodiments includes a genetically altered tissue culture produced from protoplasts or cells from the genetically altered plant of any one of the preceding embodiments, wherein the cells or protoplasts are produced from a plant part selected from the group of leaf, leaf mesophyll cell, anther, pistil, stem, petiole, root, root tip, tuber, fruit, seed, kernel, grain, flower, cotyledon, hypocotyl, embryo, or meristematic cell, wherein the genetically altered tissue culture includes the one or more genetic alterations. An additional embodiment of this aspect includes a genetically altered plant regenerated from the genetically altered tissue culture that includes the one or more genetic alterations. Still another embodiment of this aspect that can be combined with any of the preceding embodiments that has a genetically altered plant includes the genetically altered plant having all the physiological and morphological characteristics of the plant of any of the preceding embodiments. Yet another embodiment of this aspect that can be combined with any of the preceding embodiments that has a genetically altered plant includes a genetically altered plant seed produced from the genetically altered plant of any one of the preceding embodiments. A further embodiment of this aspect that can be combined with any of the preceding embodiments that has a genetically altered plant includes the seed of the plant producing a plant having all the physiological and morphological characteristics of the plant of any of the above embodiments.

### Methods of Producing and Cultivating Genetically Altered Plants

[0057] An additional aspect of the disclosure includes methods of producing the genetically altered plant of any of the preceding embodiments that has a genetically altered plant, including the steps of: (a) introducing the one or more genetic alterations into a plant cell, tissue, or other explant; (b) regenerating the plant cell, tissue, or other explant into a genetically altered plantlet; and (c) growing the genetically altered plantlet into a genetically altered plant with the one or more genetic alterations that increase activity of the NIN protein or the NLP protein in response to cytokinin signaling as compared to an untransformed WT plant. An additional embodiment of this aspect further includes identifying successful introduction of the one or more genetic alterations by screening or selecting the plant cell, tissue, or other explant prior to step (b); screening or selecting plantlets between step (b) and (c); or screening or selecting plants after step (c). In yet another embodiment, which may be combined with any of the preceding embodiments, transformation is done using a transformation method selected from the group of particle bombardment (i.e., biolistics, gene gun), Agrobacterium-mediated transformation, Rhizobium-mediated transformation, or protoplast transfection or transformation.

[0058] Still another embodiment of this aspect that can be combined with any of the preceding embodiments includes genetic alterations being introduced with a vector. An additional embodiment of this aspect includes the vector including a promoter operably linked to a nucleotide encoding a NIN or NLP protein and one or more cytokinin response elements operably linked to the promoter. Yet another embodiment of this aspect includes the promoter and the one or more cytokinin response elements being selected from the group of a NIN gene promoter including a 5′-upstream sequence including a CYCLOPS response element through a transcription start site of the NIN gene operably linked to a 3C region, the NIN gene promoter including a 5′-upstream sequence including the CYCLOPS response element through to the transcription start site of the NIN gene operably linked to a CE region, a minimal promoter operably linked to a CYCLOPS response element operably linked to a CE region, and a minimal promoter operably linked to a CYCLOPS response element operably linked to one or more cytokinin response elements. CYCLOPS response elements of the present disclosure may be a full CYCLOPS response element or an essential CYCLOPS response element (CYC-box) as shown in FIG. 5D. In a further embodiment of this aspect, the vector includes one or more gene editing components that target a nuclear genome sequence operably linked to an endogenous NIN protein or NLP protein. Yet another embodiment of this aspect includes the nuclear genome sequence being edited by the one or more gene editing components to introduce a cis-regulatory element selected from the group of one or more cytokinin response elements, a 3C region, or a CE region. Yet another embodiment of this present aspect that can be combined with any of the preceding aspects that has a vector including one or more gene editing components includes one or more gene editing components being selected from the group of a ribonucleoprotein complex that targets the nuclear genome sequence; a vector including a TALEN protein encoding sequence, wherein the TALEN protein targets the nuclear genome sequence; a vector including a ZFN protein encoding sequence, wherein the ZFN protein targets the nuclear genome sequence; an oligonucleotide donor (ODN), wherein the ODN targets the nuclear genome sequence; or a vector including a CRISPR/Cas enzyme encoding sequence and a targeting sequence, wherein the targeting sequence targets the nuclear genome sequence.

[0059] A further embodiment of this present aspect that can be combined with any of the preceding aspects that has genetic alterations being introduced with a vector includes the NIN gene promoter, 3C region, CE region, CYCLOPS response element, or one or more cytokinin response elements being from a nodulating legume species. An additional embodiment of this aspect includes the nodulating legume species being selected from the group of peanut (e.g., Arachis duranensis, Arachis hypogaea, Arachis ipaensis), pigeon pea (e.g., Cajanus cajan), chickpea (e.g., Cicer arietinum), soybean (e.g., Glycine max, Glycine soja), velvet bean (e.g., Mucuna pruriens), bean (e.g., Phaseolus vulgaris), pea (e.g., Pisum sativum), adzuki bean (e.g., Vigna angularis, Vigna angularis var. angularis), mung bean (e.g., Vigna radiata var. radiata), clover (e.g., Trifolium pratense, Trifolium subterraneum), lupine (e.g., lupin, Lupinus angustifolius), Sesbania spp. (e.g., Sesbania rostrata), Lotus japonicus, and Medicago truncatula. Yet another embodiment of this present aspect that can be combined with any of the preceding aspects that has genetic alterations being introduced with a vector wherein the vector includes 5′-upstream NIN sequence, 3C region, CE region, CYCLOPS response element, or one or more cytokinin response elements from a nodulating legume species includes cytokinin response elements being selected from the group of SEQ ID NO:551, SEQ ID NO:552, SEQ ID NO:553, SEQ ID NO:554, SEQ ID NO:555, SEQ ID NO:556, SEQ ID NO:557, SEQ ID NO:558, SEQ ID NO:559, SEQ ID NO:560, SEQ ID NO:561, SEQ ID NO:562, SEQ ID NO:563, SEQ ID NO:564, SEQ ID NO:565, SEQ ID NO:566, SEQ ID NO:567, SEQ ID NO:568, SEQ ID NO:569, SEQ ID NO:570, SEQ ID NO:571, SEQ ID NO:572, SEQ ID NO:573, SEQ ID NO:574, SEQ ID NO:575, SEQ ID NO:576, SEQ ID NO:577, SEQ ID NO:578, SEQ ID NO:579, SEQ ID NO:580, SEQ ID NO:581, SEQ ID NO:582, SEQ ID NO:583, SEQ ID NO:584, SEQ ID NO:585, SEQ ID NO:586, SEQ ID NO:587, SEQ ID NO:588, SEQ ID NO:589, SEQ ID NO:590, SEQ ID NO:591, SEQ ID NO:592, SEQ ID NO:593, SEQ ID NO:594, SEQ ID NO:595, SEQ ID NO:596, SEQ ID NO:597, SEQ ID NO:598, SEQ ID NO:599, SEQ ID NO:600, SEQ ID NO:601, SEQ ID NO:602, SEQ ID NO:603, SEQ ID NO:604, SEQ ID NO:605, SEQ ID NO:606, SEQ ID NO:607, SEQ ID NO:608, SEQ ID NO:609, SEQ ID NO:610, SEQ ID NO:611, or SEQ ID NO:612. Still another embodiment of this present aspect that can be combined with any of the preceding aspects that has genetic alterations being introduced with a vector includes cytokinin response elements being selected from the group of SEQ ID NO:613, SEQ ID NO:614, SEQ ID NO:615, SEQ ID NO:616, SEQ ID NO:617, SEQ ID NO:618, SEQ ID NO:619, SEQ ID NO:620, SEQ ID NO:621, SEQ ID NO:622, SEQ ID NO:623, SEQ ID NO:624, SEQ ID NO:625, and SEQ ID NO:626. Yet another embodiment of this present aspect that can be combined with any of the preceding aspects that has genetic alterations being introduced with a vector includes one or more cytokinin response elements being from a non-nodulating species. In yet another embodiment of this present aspect that can be combined with any of the preceding aspects that has genetic alterations being introduced with a vector, the one or more cytokinin response elements from a non-nodulating species is SEQ ID NO:613. A further embodiment of this present aspect that can be combined with any of the preceding aspects that has genetic alterations being introduced with a vector includes the one or more cytokinin response elements being from a nodulating non-legume species. An additional embodiment of this present aspect that can be combined with any of the preceding aspects that has genetic alterations being introduced with a vector includes cytokinin response elements being selected from the group of SEQ ID NO:613, SEQ ID NO:614, SEQ ID NO:679, SEQ ID NO:680, SEQ ID NO:681, SEQ ID NO:682, SEQ ID NO:683, SEQ ID NO:684, SEQ ID NO:685, or SEQ ID NO:686.

[0060] A further embodiment of this present aspect that can be combined with any of the preceding aspects that has genetic alterations being introduced with a vector includes the NIN or NLP protein being a NIN/NLP1 orthogroup protein and having at least 70% sequence identity, at least 71% sequence identity, at least 72% sequence identity, at least 73% sequence identity, at least 74% sequence identity, at least 75% sequence identity, at least 76% sequence identity, at least 77% sequence identity, at least 78% sequence identity, at least 79% sequence identity, at least 80% sequence identity, at least 81% sequence identity, at least 82% sequence identity, at least 83% sequence identity, at least 84% sequence identity, at least 85% sequence identity, at least 86% sequence identity, at least 87% sequence identity, at least 88% sequence identity, at least 89% sequence identity, at least 90% sequence identity, at least 91% sequence identity, at least 92% sequence identity, at least 93% sequence identity, at least 94% sequence identity, at least 95% sequence identity, at least 96% sequence identity, at least 97% sequence identity, at least 98% sequence identity, or at least 99% sequence identity to an amino acid sequence selected from the group of SEQ ID NO:1, SEQ ID NO:2, SEQ ID NO:3, SEQ ID NO:4, SEQ ID NO:5, SEQ ID NO:6, SEQ ID NO:8, SEQ ID NO:9, SEQ ID NO:10, SEQ ID NO:11, SEQ ID NO:12, SEQ ID NO:13, SEQ ID NO:14, SEQ ID NO:15, SEQ ID NO:16, SEQ ID NO:17, SEQ ID NO:18, SEQ ID NO:19, SEQ ID NO:20, SEQ ID NO:21, SEQ ID NO:22; SEQ ID NO:23, SEQ ID NO:24, SEQ ID NO:25, SEQ ID NO:26, SEQ ID NO:27, SEQ ID NO:28, SEQ ID NO:29, SEQ ID NO:30, SEQ ID NO:31, SEQ ID NO:32, SEQ ID NO:33, SEQ ID NO:34, SEQ ID NO:35, SEQ ID NO:36, SEQ ID NO:37, SEQ ID NO:38, SEQ ID NO:39, SEQ ID NO:40, SEQ ID NO:41, SEQ ID NO:42, SEQ ID NO:43, SEQ ID NO:44, SEQ ID NO:45, SEQ ID NO:46, SEQ ID NO:47, SEQ ID NO:48, SEQ ID NO:49, SEQ ID NO:50, SEQ ID NO:51, SEQ ID NO:52, SEQ ID NO:53, SEQ ID NO:54, SEQ ID NO:55, SEQ ID NO:56, SEQ ID NO:57, SEQ ID NO:58, SEQ ID NO:59, SEQ ID NO:60, SEQ ID NO:61, SEQ ID NO:62, SEQ ID NO:63, SEQ ID NO:64, SEQ ID NO:65, SEQ ID NO:66, SEQ ID NO:67, SEQ ID NO:68, SEQ ID NO:69, SEQ ID NO:70, SEQ ID NO:71, SEQ ID NO:72, SEQ ID NO:73, SEQ ID NO:74, SEQ ID NO:75, SEQ ID NO:76, SEQ ID NO:77, SEQ ID NO:78, SEQ ID NO:79, SEQ ID NO:80, SEQ ID NO:81, SEQ ID NO:82, SEQ ID NO:83, SEQ ID NO:84, SEQ ID NO:85, SEQ ID NO:86, SEQ ID NO:87, SEQ ID NO:88, SEQ ID NO:89, SEQ ID NO:90, SEQ ID NO:91, SEQ ID NO:92, SEQ ID NO:93, SEQ ID NO:94, SEQ ID NO:95, SEQ ID NO:96, SEQ ID NO:98, SEQ ID NO:99, SEQ ID NO:100, SEQ ID NO:101, SEQ ID NO:102, SEQ ID NO:103, SEQ ID NO:104, SEQ ID NO:105, SEQ ID NO:106, SEQ ID NO:108, SEQ ID NO:109, SEQ ID NO:131, SEQ ID NO:132, SEQ ID NO:133, SEQ ID NO:134, SEQ ID NO:135, SEQ ID NO:136, SEQ ID NO:137, SEQ ID NO:138, SEQ ID NO:139, SEQ ID NO:140, SEQ ID NO:141, SEQ ID NO:142, SEQ ID NO:143, SEQ ID NO:144, SEQ ID NO:145, SEQ ID NO:146, SEQ ID NO:147, SEQ ID NO:148, SEQ ID NO:149, SEQ ID NO:150, SEQ ID NO:151, SEQ ID NO:152, SEQ ID NO:153, SEQ ID NO:154, SEQ ID NO:155, SEQ ID NO:156, SEQ ID NO:157, SEQ ID NO:158, SEQ ID NO:159, SEQ ID NO:160, SEQ ID NO:161, SEQ ID NO:162, SEQ ID NO:163, SEQ ID NO:164, SEQ ID NO:165, SEQ ID NO:166, SEQ ID NO:167, SEQ ID NO:168, SEQ ID NO:169, SEQ ID NO:170, SEQ ID NO:171, SEQ ID NO:172, SEQ ID NO:173, SEQ ID NO:174, SEQ ID NO:175, SEQ ID NO:177, SEQ ID NO:178, SEQ ID NO:179, SEQ ID NO:180, SEQ ID NO:181, SEQ ID NO:182, SEQ ID NO:183, SEQ ID NO:184, SEQ ID NO:185, SEQ ID NO:186, SEQ ID NO:187, SEQ ID NO:188, SEQ ID NO:189, SEQ ID NO:190, SEQ ID NO:191, SEQ ID NO:192, SEQ ID NO:193, SEQ ID NO:194, SEQ ID NO:196, SEQ ID NO:197, SEQ ID NO:198, SEQ ID NO:199, SEQ ID NO:200, SEQ ID NO:201, SEQ ID NO:202, SEQ ID NO:203, SEQ ID NO:204, SEQ ID NO:205, SEQ ID NO:206, SEQ ID NO:207, SEQ ID NO:208, SEQ ID NO:209, SEQ ID NO:210, SEQ ID NO:211, SEQ ID NO:212, SEQ ID NO:213, SEQ ID NO:214, SEQ ID NO:215, SEQ ID NO:216, SEQ ID NO:217, SEQ ID NO:218, SEQ ID NO:219, SEQ ID NO:220, SEQ ID NO:221, SEQ ID NO:222, SEQ ID NO:223, SEQ ID NO:224, SEQ ID NO:225, SEQ ID NO:226, SEQ ID NO:227, SEQ ID NO:228, SEQ ID NO:229, SEQ ID NO:230, SEQ ID NO:231, SEQ ID NO:232, SEQ ID NO:233, SEQ ID NO:234, SEQ ID NO:235, SEQ ID NO:236, SEQ ID NO:687, SEQ ID NO:688, SEQ ID NO:689, SEQ ID NO:690, SEQ ID NO:691, SEQ ID NO:692, or SEQ ID NO:693. Yet another embodiment of this present aspect that can be combined with any of the preceding aspects that has genetic alterations being introduced with a vector includes the NIN/NLP1 orthogroup protein being a NIN protein and having at least 70% sequence identity, at least 71% sequence identity, at least 72% sequence identity, at least 73% sequence identity, at least 74% sequence identity, at least 75% sequence identity, at least 76% sequence identity, at least 77% sequence identity, at least 78% sequence identity, at least 79% sequence identity, at least 80% sequence identity, at least 81% sequence identity, at least 82% sequence identity, at least 83% sequence identity, at least 84% sequence identity, at least 85% sequence identity, at least 86% sequence identity, at least 87% sequence identity, at least 88% sequence identity, at least 89% sequence identity, at least 90% sequence identity, at least 91% sequence identity, at least 92% sequence identity, at least 93% sequence identity, at least 94% sequence identity, at least 95% sequence identity, at least 96% sequence identity, at least 97% sequence identity, at least 98% sequence identity, or at least 99% sequence identity to an amino acid sequence selected from the group of SEQ ID NO:22 (i.e., CsaNIN; Cannabis sativa), SEQ ID NO:78 (i.e., HluNIN; Humulus lupulus), SEQ ID NO:89 (i.e., LjNIN; Lotus japonicus), SEQ ID NO:108 (i.e., MtNIN; Medicago truncatula); SEQ ID NO:136 (i.e., PanNIN; Parasponia andersonii), SEQ ID NO:139 (i.e., PriNIN; Parasponia rigida), SEQ ID NO:142 (i.e., PruNIN; Parasponia rugosa), SEQ ID NO:185 (i.e., TleNIN; Trema levigata; truncated version of NIN), SEQ ID NO:187 (i.e., TorNIN; Trema orientalis; truncated version of NIN), SEQ ID NO:190 (i.e., TtoNIN; Trema tomentosa; truncated version of NIN), SEQ ID NO:236 (i.e., ZjuNIN; Ziziphus jujuba), SEQ ID NO:687 (i.e., AglNIN; Alnus glutinosa), SEQ ID NO:688 (i.e., CglNIN; Casuarina glauca), SEQ ID NO:689 (i.e., DglNIN.1; Datisca glomerata), SEQ ID NO:690 (i.e., DglNIN.2; Datisca glomerata), SEQ ID NO:691 (i.e., DtrNIN; Discaria trinervis), SEQ ID NO:692 (i.e., DdrNIN; Dryas drummondii), or SEQ ID NO:693 (i.e., PtrNIN; Purshia tridentata). Another embodiment of this present aspect that can be combined with any of the preceding aspects that has genetic alterations being introduced with a vector includes the NIN/NLP1 orthogroup protein being a NIN protein and having at least 70% sequence identity, at least 71% sequence identity, at least 72% sequence identity, at least 73% sequence identity, at least 74% sequence identity, at least 75% sequence identity, at least 76% sequence identity, at least 77% sequence identity, at least 78% sequence identity, at least 79% sequence identity, at least 80% sequence identity, at least 81% sequence identity, at least 82% sequence identity, at least 83% sequence identity, at least 84% sequence identity, at least 85% sequence identity, at least 86% sequence identity, at least 87% sequence identity, at least 88% sequence identity, at least 89% sequence identity, at least 90% sequence identity, at least 91% sequence identity, at least 92% sequence identity, at least 93% sequence identity, at least 94% sequence identity, at least 95% sequence identity, at least 96% sequence identity, at least 97% sequence identity, at least 98% sequence identity, or at least 99% sequence identity to an amino acid sequence selected from the group of SEQ ID NO:89 (i.e., LjNIN; Lotus japonicus) or SEQ ID NO:108 (i.e., MtNIN; Medicago truncatula). Still another embodiment of this present aspect that can be combined with any of the preceding aspects that has genetic alterations being introduced with a vector includes the NIN or NLP protein being a NLP2-3 orthogroup protein and having at least 70% sequence identity, at least 71% sequence identity, at least 72% sequence identity, at least 73% sequence identity, at least 74% sequence identity, at least 75% sequence identity, at least 76% sequence identity, at least 77% sequence identity, at least 78% sequence identity, at least 79% sequence identity, at least 80% sequence identity, at least 81% sequence identity, at least 82% sequence identity, at least 83% sequence identity, at least 84% sequence identity, at least 85% sequence identity, at least 86% sequence identity, at least 87% sequence identity, at least 88% sequence identity, at least 89% sequence identity, at least 90% sequence identity, at least 91% sequence identity, at least 92% sequence identity, at least 93% sequence identity, at least 94% sequence identity, at least 95% sequence identity, at least 96% sequence identity, at least 97% sequence identity, at least 98% sequence identity, or at least 99% sequence identity to an amino acid sequence selected from the group of SEQ ID NO:237, SEQ ID NO:238, SEQ ID NO:239, SEQ ID NO:241, SEQ ID NO:242, SEQ ID NO:243, SEQ ID NO:244, SEQ ID NO:245, SEQ ID NO:246, SEQ ID NO:247, SEQ ID NO:248, SEQ ID NO:250, SEQ ID NO:251, SEQ ID NO:252, SEQ ID NO:253, SEQ ID NO:254, SEQ ID NO:255, SEQ ID NO:256, SEQ ID NO:257, SEQ ID NO:258, SEQ ID NO:259, SEQ ID NO:260, SEQ ID NO:261, SEQ ID NO:262, SEQ ID NO:263, SEQ ID NO:264, SEQ ID NO:265, SEQ ID NO:266, SEQ ID NO:267, SEQ ID NO:268, SEQ ID NO:269, SEQ ID NO:270, SEQ ID NO:271, SEQ ID NO:273, SEQ ID NO:274, SEQ ID NO:275, SEQ ID NO:276, SEQ ID NO:277, SEQ ID NO:278, SEQ ID NO:279, SEQ ID NO:280, SEQ ID NO:281, SEQ ID NO:282, SEQ ID NO:283, SEQ ID NO:284, SEQ ID NO:285, SEQ ID NO:286, SEQ ID NO:287, SEQ ID NO:288, SEQ ID NO:289, SEQ ID NO:290, SEQ ID NO:291, SEQ ID NO:292, SEQ ID NO:293, SEQ ID NO:294, SEQ ID NO:295, SEQ ID NO:296, SEQ ID NO:297, SEQ ID NO:298, SEQ ID NO:299, SEQ ID NO:300, SEQ ID NO:301, SEQ ID NO:302, SEQ ID NO:303, SEQ ID NO:304, SEQ ID NO:305, SEQ ID NO:306, SEQ ID NO:307, SEQ ID NO:308, SEQ ID NO:309, SEQ ID NO:310, SEQ ID NO:311, SEQ ID NO:312, SEQ ID NO:313, SEQ ID NO:314, SEQ ID NO:315, SEQ ID NO:316, SEQ ID NO:317, SEQ ID NO:318, SEQ ID NO:319, SEQ ID NO:320, SEQ ID NO:321, SEQ ID NO:322, SEQ ID NO:323, SEQ ID NO:324, SEQ ID NO:325, SEQ ID NO:326, SEQ ID NO:327, SEQ ID NO:328, SEQ ID NO:329, SEQ ID NO:332, SEQ ID NO:333, SEQ ID NO:334, SEQ ID NO:335, SEQ ID NO:336, SEQ ID NO:337, SEQ ID NO:338, SEQ ID NO:339, SEQ ID NO:340, SEQ ID NO:341, SEQ ID NO:342, SEQ ID NO:343, SEQ ID NO:344, SEQ ID NO:345, SEQ ID NO:346, SEQ ID NO:347, SEQ ID NO:348, SEQ ID NO:349, SEQ ID NO:350, SEQ ID NO:351, SEQ ID NO:352, SEQ ID NO:353, SEQ ID NO:354, SEQ ID NO:355, SEQ ID NO:356, SEQ ID NO:357, SEQ ID NO:358, SEQ ID NO:359, SEQ ID NO:360, SEQ ID NO:361, SEQ ID NO:362, SEQ ID NO:363, SEQ ID NO:364, SEQ ID NO:365, SEQ ID NO:366, SEQ ID NO:367, SEQ ID NO:368, SEQ ID NO:369, SEQ ID NO:371, SEQ ID NO:372, SEQ ID NO:373, SEQ ID NO:374, SEQ ID NO:375, SEQ ID NO:376, and SEQ ID NO:377. A further embodiment of this present aspect that can be combined with any of the preceding aspects that has genetic alterations being introduced with a vector includes the NIN or NLP protein being a NLP4 orthogroup protein and having at least 70% sequence identity, at least 71% sequence identity, at least 72% sequence identity, at least 73% sequence identity, at least 74% sequence identity, at least 75% sequence identity, at least 76% sequence identity, at least 77% sequence identity, at least 78% sequence identity, at least 79% sequence identity, at least 80% sequence identity, at least 81% sequence identity, at least 82% sequence identity, at least 83% sequence identity, at least 84% sequence identity, at least 85% sequence identity, at least 86% sequence identity, at least 87% sequence identity, at least 88% sequence identity, at least 89% sequence identity, at least 90% sequence identity, at least 91% sequence identity, at least 92% sequence identity, at least 93% sequence identity, at least 94% sequence identity, at least 95% sequence identity, at least 96% sequence identity, at least 97% sequence identity, at least 98% sequence identity, or at least 99% sequence identity to an amino acid sequence selected from the group of SEQ ID NO:378, SEQ ID NO:379, SEQ ID NO:380, SEQ ID NO:381, SEQ ID NO:382, SEQ ID NO:383, SEQ ID NO:384, SEQ ID NO:385, SEQ ID NO:386, SEQ ID NO:387, SEQ ID NO:388, SEQ ID NO:389, SEQ ID NO:390, SEQ ID NO:391, SEQ ID NO:392, SEQ ID NO:393, SEQ ID NO:394, SEQ ID NO:395, SEQ ID NO:396, SEQ ID NO:397, SEQ ID NO:398, SEQ ID NO:399, SEQ ID NO:400, SEQ ID NO:401, SEQ ID NO:402, SEQ ID NO:403, SEQ ID NO:404, SEQ ID NO:405, SEQ ID NO:406, SEQ ID NO:408, SEQ ID NO:409, SEQ ID NO:410, SEQ ID NO:411, SEQ ID NO:412, SEQ ID NO:413, SEQ ID NO:414, SEQ ID NO:415, SEQ ID NO:417, SEQ ID NO:418, SEQ ID NO:419, SEQ ID NO:420, SEQ ID NO:421, SEQ ID NO:422, SEQ ID NO:423, SEQ ID NO:424, SEQ ID NO:425, SEQ ID NO:426, SEQ ID NO:427, SEQ ID NO:428, SEQ ID NO:429, SEQ ID NO:430, SEQ ID NO:431, SEQ ID NO:432, SEQ ID NO:433, SEQ ID NO:434, SEQ ID NO:435, SEQ ID NO:436, SEQ ID NO:437, SEQ ID NO:438, SEQ ID NO:439, SEQ ID NO:440, SEQ ID NO:441, SEQ ID NO:442, SEQ ID NO:443, SEQ ID NO:444, SEQ ID NO:445, SEQ ID NO:446, SEQ ID NO:447, SEQ ID NO:448, SEQ ID NO:449, SEQ ID NO:450, SEQ ID NO:451, SEQ ID NO:452, SEQ ID NO:453, SEQ ID NO:455, SEQ ID NO:456, SEQ ID NO:457, SEQ ID NO:458, SEQ ID NO:459, SEQ ID NO:460, SEQ ID NO:461, SEQ ID NO:462, SEQ ID NO:463, SEQ ID NO:464, SEQ ID NO:465, SEQ ID NO:466, SEQ ID NO:467, SEQ ID NO:468, SEQ ID NO:469, SEQ ID NO:470, SEQ ID NO:471, SEQ ID NO:472, SEQ ID NO:473, SEQ ID NO:474, SEQ ID NO:475, SEQ ID NO:476, SEQ ID NO:477, SEQ ID NO:478, SEQ ID NO:479, SEQ ID NO:480, SEQ ID NO:481, SEQ ID NO:482, SEQ ID NO:483, SEQ ID NO:484, SEQ ID NO:485, SEQ ID NO:486, SEQ ID NO:487, SEQ ID NO:488, SEQ ID NO:489, SEQ ID NO:490, SEQ ID NO:491, SEQ ID NO:492, SEQ ID NO:493, SEQ ID NO:494, SEQ ID NO:495, SEQ ID NO:496, SEQ ID NO:497, SEQ ID NO:498, SEQ ID NO:499, SEQ ID NO:500, SEQ ID NO:501, SEQ ID NO:502, SEQ ID NO:504, SEQ ID NO:505, SEQ ID NO:506, SEQ ID NO:507, SEQ ID NO:508, SEQ ID NO:509, SEQ ID NO:510, SEQ ID NO:511, SEQ ID NO:512, SEQ ID NO:513, SEQ ID NO:514, SEQ ID NO:515, SEQ ID NO:516, SEQ ID NO:517, SEQ ID NO:518, SEQ ID NO:519, SEQ ID NO:520, SEQ ID NO:521, SEQ ID NO:522, SEQ ID NO:523, and SEQ ID NO: 524. An additional embodiment of this present aspect that can be combined with any of the preceding aspects that has genetic alterations being introduced with a vector includes the NIN or NLP protein being a basal NIN/NLP orthogroup protein and having at least at least 70% sequence identity, at least 71% sequence identity, at least 72% sequence identity, at least 73% sequence identity, at least 74% sequence identity, at least 75% sequence identity, at least 76% sequence identity, at least 77% sequence identity, at least 78% sequence identity, at least 79% sequence identity, at least 80% sequence identity, at least 81% sequence identity, at least 82% sequence identity, at least 83% sequence identity, at least 84% sequence identity, at least 85% sequence identity, at least 86% sequence identity, at least 87% sequence identity, at least 88% sequence identity, at least 89% sequence identity, at least 90% sequence identity, at least 91% sequence identity, at least 92% sequence identity, at least 93% sequence identity, at least 94% sequence identity, at least 95% sequence identity, at least 96% sequence identity, at least 97% sequence identity, at least 98% sequence identity, or at least 99% sequence identity to an amino acid sequence selected from the group of SEQ ID NO:637, SEQ ID NO:638, SEQ ID NO:639, SEQ ID NO:640, SEQ ID NO:641, SEQ ID NO:642, SEQ ID NO:643, SEQ ID NO:644, SEQ ID NO:645, SEQ ID NO:646, SEQ ID NO:647, SEQ ID NO:648, SEQ ID NO:649, SEQ ID NO:650, SEQ ID NO:651, SEQ ID NO:652, SEQ ID NO:653, SEQ ID NO:654, SEQ ID NO:655, SEQ ID NO:656, SEQ ID NO:657, SEQ ID NO:658, SEQ ID NO:659, SEQ ID NO:660, SEQ ID NO:661, or SEQ ID NO:662.

[0061] A further embodiment of the present aspect, which may be combined with any of the preceding embodiments, includes knocking out an endogenous NIN or NLP gene to generate a nin knockout mutant before step (a) and identifying successful complementation of nin knockout mutant by any one of the constructs including a nucleotide encoding a NIN or NLP protein of the preceding embodiments by screening or selecting the plant cell, tissue, or other explant prior to step (b); screening or selecting plantlets between step (b) and (c); or screening or selecting plants after step (c).

[0062] A further aspect of the disclosure includes methods of cultivating the genetically altered plant of any of the preceding embodiments that has a genetically altered plant, including the steps of: planting a genetically altered seedling, a genetically altered plantlet, a genetically altered cutting, a genetically altered tuber, a genetically altered root, or a genetically altered seed in soil to produce the genetically altered plant or grafting the genetically altered seedling, the genetically altered plantlet, or the genetically altered cutting to a root stock or a second plant grown in soil to produce the genetically altered plant; cultivating the plant to produce harvestable seed, harvestable leaves, harvestable roots, harvestable cuttings, harvestable wood, harvestable fruit, harvestable kernels, harvestable tubers, and/or harvestable grain; and harvesting the harvestable seed, harvestable leaves, harvestable roots, harvestable cuttings, harvestable wood, harvestable fruit, harvestable kernels, harvestable tubers, and/or harvestable grain.

### Molecular Biological Methods to Produce Genetically Altered Plants and Plant Cells

[0063] One embodiment of the present invention provides a genetically altered plant or plant cell including one or more modified cis-regulatory elements and/or introduced cis-regulatory elements. For example, the present disclosure provides genetically altered plants with the addition of one or more cytokinin response elements operably linked to a nucleic acid encoding the NIN protein or the NLP protein where the one or more cytokinin response elements have been introduced by genetic alteration of the plant, the nucleic acid encoding the NIN protein or the NLP protein have been introduced by genetic alteration of the plant, or both the one or more cytokinin response elements and the nucleic acid encoding the NIN protein or the NLP protein have been introduced by genetic alteration of the plant.

[0064] Transformation and generation of genetically altered monocotyledonous and dicotyledonous plant cells is well known in the art. See, e.g., Weising, et al., Ann. Rev. Genet. 22:421-477 (1988); U.S. Pat. No. 5,679,558; Agrobacterium Protocols, ed: Gartland, Humana Press Inc. (1995); Wang, et al. Acta Hort. 461:401-408 (1998), and Broothaerts, et al. Nature 433:629-633 (2005). The choice of method varies with the type of plant to be transformed, the particular application and/or the desired result. The appropriate transformation technique is readily chosen by the skilled practitioner.

[0065] Any methodology known in the art to delete, insert or otherwise modify the cellular DNA (e.g., genomic DNA and organelle DNA) can be used in practicing the inventions disclosed herein. As an example, the CRISPR/Cas-9 system and related systems (e.g., TALEN, ZFN, ODN, etc.) may be used to insert a heterologous gene to a targeted site in the genomic DNA or substantially edit an endogenous gene to express the heterologous gene. For example, a disarmed Ti plasmid, containing a genetic construct for deletion or insertion of a target gene, in Agrobacterium tumefaciens can be used to transform a plant cell, and thereafter, a transformed plant can be regenerated from the transformed plant cell using procedures described in the art, for example, in EP 0116718, EP 0270822, PCT publication WO 84/02913 and published European Patent application (“EP”) 0242246. Ti-plasmid vectors each contain the gene between the border sequences, or at least located to the left of the right border sequence, of the T-DNA of the Ti-plasmid. Of course, other types of vectors can be used to transform the plant cell, using procedures such as direct gene transfer (as described, for example in EP 0233247), pollen mediated transformation (as described, for example in EP 0270356, PCT publication WO 85/01856, and U.S. Pat. No. 4,684,611), plant RNA virus-mediated transformation (as described, for example in EP 0 067 553 and U.S. Pat. No. 4,407,956), liposome-mediated transformation (as described, for example in U.S. Pat. No. 4,536,475), and other methods such as the methods for transforming certain lines of corn (e.g., U.S. Pat. No. 6,140,553; Fromm et al., Bio/Technology (1990) 8, 833-839); Gordon-Kamm et al., The Plant Cell, (1990) 2, 603-618), rice (Shimamoto et al., Nature, (1989) 338, 274-276; Datta et al., Bio/Technology, (1990) 8, 736-740), and the method for transforming monocots generally (PCT publication WO 92/09696). For cotton transformation, the method described in PCT patent publication WO 00/71733 can be used. For soybean transformation, reference is made to methods known in the art, e.g., Hinchee et al. (Bio/Technology, (1988) 6, 915) and Christou et al. (Trends Biotech, (1990) 8, 145) or the method of WO 00/42207. Heterologous genes may be from closely related plant species, distantly related plant species, or basal plants (e.g., Physcomitrella spp.) (Possart et al., The Plant Cell, (2017) 29, 310-330; Frangedakis et al., New Phytol, (2017) 216, 591-604).

[0066] Genetically altered plants of the present invention can be used in a conventional plant breeding scheme to produce more genetically altered plants with the same characteristics, or to introduce the genetic alteration(s) in other varieties of the same or related plant species. Seeds, which are obtained from the altered plants, preferably contain the genetic alteration(s) as a stable insert in chromosomal DNA or as modifications to an endogenous gene or promoter. Plants including the genetic alteration(s) in accordance with the invention include plants including, or derived from, root stocks of plants including the genetic alteration(s) of the invention, e.g., fruit trees or ornamental plants. Hence, any non-transgenic grafted plant parts inserted on a transformed plant or plant part are included in the invention.

[0067] Cis-regulatory elements responsive to cytokinin signaling of the present invention contain B-type cytokinin RESPONSE REGULATOR (RR) binding sites (i.e., cytokinin responsive elements). These cytokinin responsive elements were identified and experimentally characterized in Arabidopsis thaliana in vitro and in vivo studies (Sakai et al., Science, (2001) 294, 1519-1521; Hosoda et al., Plant Cell, (2002) 14, 2015-2029; Imamura et al., Plant Cell Phys, (2003), 22, 122-131, Zhao et al., Nature Letters (2010), 465, 1089-1093), and have also been shown to be conserved in rice (Ross et al., J. Exp. Bot., (2004) 55, 1721-1731). The core conserved element in type-B RR binding sites is the nucleic acid sequence GAT, which is flanked by 5′-(A/G) and 3′-(C/T). The cytokinin responsive elements of the present invention (i.e., cytokinin response element) can be isolated from a plant or synthetic. The cytokinin response elements isolated from a plant can be isolated from 5′-upstream regions of a NIN gene from a nodulating legume species, and can include larger regions (e.g., 3C region, CE region) as shown in FIGS. 4A and 5A-5C. The design of synthetic cytokinin response elements is described in Zürcher et al., Plant Phys, (2013) 161, 1066-1075, which is hereby incorporated by reference.

[0068] An introduced cytokinin response element of the present invention may be inserted in host cell DNA so that the inserted cytokinin response element part is upstream (i.e., 5′) of suitable 3′ end transcription regulation signals (e.g., transcript formation and polyadenylation signals). This is preferably accomplished by inserting the cytokinin response element in the plant cell genome (nuclear or chloroplast). In some embodiments, one or more of the introduced cytokinin response elements are stably integrated into the nuclear genome. Stable integration is present when the nucleic acid sequence remains integrated into the nuclear genome and continues to be expressed (e.g., detectable mRNA transcript or protein is produced) throughout subsequent plant generations. Stable integration into and/or editing of the nuclear genome can be accomplished by any known method in the art (e.g., microparticle bombardment, Agrobacterium-mediated transformation, CRISPR/Cas9, electroporation of protoplasts, microinjection, etc.). In some embodiments, a cytokinin response element of the present invention is inserted into host cell DNA along with a NIN or NLP gene. Preferred polyadenylation and transcript formation signals include those of the nopaline synthase gene (Depicker et al., J. Molec Appl Gen, (1982) 1, 561-573), the octopine synthase gene (Gielen et al., EMBO J, (1984) 3:835 845), the SCSV or the Malic enzyme terminators (Schunmann et al., Plant Funct Biol, (2003) 30:453-460), and the T DNA gene 7 (Velten and Schell, Nucleic Acids Res, (1985) 13, 6981 6998), which act as 3′ untranslated DNA sequences in transformed plant cells

[0069] Introduced cytokinin response elements are preferably operably linked to a plant-expressible promoter. A ‘plant-expressible promoter’ as used herein refers to a promoter that ensures expression of the genetic alteration(s) of the invention in a plant cell. A plant-expressible promoter can be a 5′-upstream region of a plant gene, such a 5′-upstream region of a NIN gene from a nodulating legume species, which can include 3C regions, CE regions, and/or a CYCLOPS response element. CYCLOPS response elements of the present disclosure may be a full CYCLOPS response element or an essential CYCLOPS response element (CYC-box) as shown in FIG. 5D. Further, a plant-expressible promoter can be a constitutive promoter. In addition, a plant-expressible promoter can be a tissue-specific promoter, e.g., a promoter directing a higher level of expression in some cells or tissues of the plant, e.g., in root pericycle cells.

[0070] In preferred embodiments, promoters and other components derived from 5′-upstream regions of NIN genes (i.e., NIN gene promoters) from nodulating legume species will be used. Non-limiting examples include a NIN gene promoter containing a 5′-upstream sequence including a CYCLOPS response element through to the transcription start site of the NIN gene operably linked to a 3C region, a NIN gene promoter containing a 5′-upstream sequence including a CYCLOPS response element through to the transcription start site of the NIN gene operably linked to a CE region, a NIN gene promoter containing a 5′-upstream sequence including a CYCLOPS response element through to the transcription start site of the NIN gene operably linked to one or more cytokinin response elements, a NIN gene promoter operably linked to a 3C region, a NIN gene promoter operably linked to a CE region, and a NIN gene promoter operably linked to one or more cytokinin response elements.

[0071] Examples of constitutive promoters that are often used in plant cells are the cauliflower mosaic (CaMV) 35S promoter (KAY et al. Science, 236, 4805, 1987), the minimal CaMV 35S promoter (Benfey & Chua, Science, (1990) 250, 959-966), various other derivatives of the CaMV 35S promoter, the maize ubiquitin promoter (CHRISTENSEN & QUAIL, Transgenic Res, 5, 213-8, 1996), the trefoil promoter (Ljubql, MAEKAWA et al. Mol Plant Microbe Interact. 21, 375-82, 2008), the vein mosaic cassava virus promoter (International Application WO 97/48819), and the Arabidopsis UBQ10 promoter, Norris et al. Plant Mol. Biol. 21, 895-906, 1993). In preferred embodiments, minimal CaMV 35S promoters will be used that contain cytokinin responsive elements. Non-limiting examples include a minimal CaMV 35S promoter operably linked to a CYCLOPS response element operably linked to a CE region, a minimal CaMV 35S promoter operably linked to a CYCLOPS response element operably linked to one or more cytokinin response elements, a minimal CaMV 35S promoter operably linked to a CE region, and a minimal CaMV 35S promoter operably linked to one or more cytokinin response elements.

[0072] Additional examples of promoters directing constitutive expression in plants are known in the art and include: the strong constitutive 35S promoters (the “35S promoters”) of the cauliflower mosaic virus (CaMV), e.g., of isolates CM 1841 (Gardner et al., Nucleic Acids Res, (1981) 9, 2871-2887), CabbB S (Franck et al., Cell (1980) 21, 285 294) and CabbB JI (Hull and Howell, Virology, (1987) 86, 482 493); promoters from the ubiquitin family (e.g., the maize ubiquitin promoter of Christensen et al., Plant Mol Biol, (1992) 18, 675-689), the gos2 promoter (de Pater et al., The Plant J (1992) 2, 834-844), the emu promoter (Last et al., Theor Appl Genet, (1990) 81, 581-588), actin promoters such as the promoter described by An et al. (The Plant J, (1996) 10, 107), the rice actin promoter described by Zhang et al. (The Plant Cell, (1991) 3, 1155-1165); promoters of the Cassava vein mosaic virus (WO 97/48819, Verdaguer et al. (Plant Mol Biol, (1998) 37, 1055-1067), the pPLEX series of promoters from Subterranean Clover Stunt Virus (WO 96/06932, particularly the S4 or S7 promoter), an alcohol dehydrogenase promoter, e.g., pAdh1S (GenBank accession numbers X04049, X00581), and the TR1′ promoter and the TR2′ promoter (the “TR1′ promoter” and “TR2′ promoter”, respectively) which drive the expression of the 1′ and 2′ genes, respectively, of the T DNA (Velten et al., EMBO J, (1984) 3, 2723 2730).

[0073] Non-limiting examples of tissue-specific promoters include a NFR1 or NFR5/NFP promoter, particularly the Lotus NFR5 promoter (SEQ ID NO: 24) and the Lotus NFR1 promoters (SEQ ID NO: 25) the maize allothioneine promoter (DE FRAMOND et al, FEBS 290, 103-106, 1991 Application EP 452269), the chitinase promoter (SAMAC et al. Plant Physiol 93, 907-914, 1990), the maize ZRP2 promoter (U.S. Pat. No. 5,633,363), the tomato LeExtl promoter (Bucher et al. Plant Physiol. 128, 911-923, 2002), the glutamine synthetase soybean root promoter (HIREL et al. Plant Mol. Biol. 20, 207-218, 1992), the RCC3 promoter (PCT Application WO 2009/016104), the rice antiquitine promoter (PCT Application WO 2007/076115), the LRR receptor kinase promoter (PCT application WO 02/46439), and the Arabidopsis pCO2 promoter (HEIDSTRA et al, Genes Dev. 18, 1964-1969, 2004). These plant promoters can be combined with enhancer elements, they can be combined with minimal promoter elements, or can comprise repeated elements to ensure the expression profile desired.

[0074] In some embodiments, genetic elements to increase expression in plant cells can be utilized. For example, an intron at the 5′ end or 3′ end of an introduced gene, or in the coding sequence of the introduced gene, e.g., the hsp70 intron. Other such genetic elements can include, but are not limited to, promoter enhancer elements, duplicated or triplicated promoter regions, 5′ leader sequences different from another transgene or different from an endogenous (plant host) gene leader sequence, 3′ trailer sequences different from another transgene used in the same plant or different from an endogenous (plant host) trailer sequence.

[0075] The term recombinant or modified nucleic acids refers to polynucleotides which are made by the combination of two otherwise separated segments of sequence accomplished by the artificial manipulation of isolated segments of polynucleotides by genetic engineering techniques or by chemical synthesis. In so doing one may join together polynucleotide segments of desired functions to generate a desired combination of functions.

[0076] As used herein, the term “upregulation” refers to increased expression (e.g., of mRNA, polypeptides, etc.) relative to expression in a wild type organism (e.g., plant) as a result of genetic modification with a particular emphasis on upregulation in response to a stimulus such as cytokinin signaling. In some embodiments, the increase in expression is a slight increase of about 10% more than expression in wild type. In some embodiments, the increase in expression is an increase of 50% or more (e.g., 60%, 70%, 80%, 100%, etc.) relative to expression in wild type. In some embodiments, an endogenous gene is upregulated. In some embodiments, an exogenous gene is upregulated by virtue of being expressed. Upregulation of a gene in plants can be achieved through any known method in the art, including but not limited to, the use of constitutive promoters with inducible response elements added, inducible promoters, high expression promoters (e.g., PsaD promoter) with inducible response elements added, enhancers, transcriptional and/or translational regulatory sequences, codon optimization, modified transcription factors, and/or mutant or modified genes that control expression of the gene to be upregulated in response to a stimulus such as cytokinin signaling.

[0077] Where a recombinant nucleic acid is intended for expression, cloning, or replication of a particular sequence, DNA constructs prepared for introduction into a host cell will typically comprise a replication system (e.g., vector) recognized by the host, including the intended DNA fragment encoding a desired polypeptide, and can also include transcription and translational initiation regulatory sequences operably linked to the polypeptide-encoding segment. Additionally, such constructs can include cellular localization signals (e.g., plasma membrane localization signals). In preferred embodiments, such DNA constructs are introduced into a host cell's genomic DNA, chloroplast DNA or mitochondrial DNA.

[0078] In some embodiments, a non-integrated expression system can be used to induce expression of one or more introduced genes. Expression systems (expression vectors) can include, for example, an origin of replication or autonomously replicating sequence (ARS) and expression control sequences, a promoter, an enhancer and necessary processing information sites, such as ribosome-binding sites, RNA splice sites, polyadenylation sites, transcriptional terminator sequences, and mRNA stabilizing sequences. Signal peptides can also be included where appropriate from secreted polypeptides of the same or related species, which allow the protein to cross and/or lodge in cell membranes, cell wall, or be secreted from the cell.

[0079] Selectable markers useful in practicing the methodologies of the invention disclosed herein can be positive selectable markers. Typically, positive selection refers to the case in which a genetically altered cell can survive in the presence of a toxic substance only if the recombinant polynucleotide of interest is present within the cell. Negative selectable markers and screenable markers are also well known in the art and are contemplated by the present invention. One of skill in the art will recognize that any relevant markers available can be utilized in practicing the inventions disclosed herein.

[0080] Screening and molecular analysis of recombinant strains of the present invention can be performed utilizing nucleic acid hybridization techniques. Hybridization procedures are useful for identifying polynucleotides, such as those modified using the techniques described herein, with sufficient homology to the subject regulatory sequences to be useful as taught herein. The particular hybridization techniques are not essential to the subject invention. As improvements are made in hybridization techniques, they can be readily applied by one of skill in the art. Hybridization probes can be labeled with any appropriate label known to those of skill in the art. Hybridization conditions and washing conditions, for example temperature and salt concentration, can be altered to change the stringency of the detection threshold. See, e.g., Sambrook et al. (1989) vide infra or Ausubel et al. (1995) Current Protocols in Molecular Biology, John Wiley & Sons, NY, N.Y., for further guidance on hybridization conditions.

[0081] Additionally, screening and molecular analysis of genetically altered strains, as well as creation of desired isolated nucleic acids can be performed using Polymerase Chain Reaction (PCR). PCR is a repetitive, enzymatic, primed synthesis of a nucleic acid sequence. This procedure is well known and commonly used by those skilled in this art (see Mullis, U.S. Pat. Nos. 4,683,195, 4,683,202, and 4,800,159; Saiki et al. (1985) Science 230:1350-1354). PCR is based on the enzymatic amplification of a DNA fragment of interest that is flanked by two oligonucleotide primers that hybridize to opposite strands of the target sequence. The primers are oriented with the 3′ ends pointing towards each other. Repeated cycles of heat denaturation of the template, annealing of the primers to their complementary sequences, and extension of the annealed primers with a DNA polymerase result in the amplification of the segment defined by the 5′ ends of the PCR primers. Because the extension product of each primer can serve as a template for the other primer, each cycle essentially doubles the amount of DNA template produced in the previous cycle. This results in the exponential accumulation of the specific target fragment, up to several million-fold in a few hours. By using a thermostable DNA polymerase such as the Taq polymerase, which is isolated from the thermophilic bacterium Thermus aquaticus, the amplification process can be completely automated. Other enzymes which can be used are known to those skilled in the art.

[0082] Nucleic acids and proteins of the present invention can also encompass homologues of the specifically disclosed sequences for NIN proteins and NLP proteins. Homology (e.g., sequence identity) can be 50%-100%. In some instances, such homology is greater than 80%, greater than 85%, greater than 90%, or greater than 95%. The degree of homology or identity needed for any intended use of the sequence(s) is readily identified by one of skill in the art. As used herein percent sequence identity of two nucleic acids is determined using an algorithm known in the art, such as that disclosed by Karlin and Altschul (1990) Proc. Natl. Acad. Sci. USA 87:2264-2268, modified as in Karlin and Altschul (1993) Proc. Natl. Acad. Sci. USA 90:5873-5877. Such an algorithm is incorporated into the NBLAST and XBLAST programs of Altschul et al. (1990) J. Mol. Biol. 215:402-410. BLAST nucleotide searches are performed with the NBLAST program, score=100, wordlength=12, to obtain nucleotide sequences with the desired percent sequence identity. To obtain gapped alignments for comparison purposes, Gapped BLAST is used as described in Altschul et al. (1997) Nucl. Acids. Res. 25:3389-3402. When utilizing BLAST and Gapped BLAST programs, the default parameters of the respective programs (NBLAST and XBLAST) are used. See www.ncbi.nih.gov.

[0083] Preferred host cells are plant cells. Recombinant host cells, in the present context, are those which have been genetically modified to contain an isolated nucleic molecule, contain one or more deleted or otherwise non-functional genes normally present and functional in the host cell, or contain one or more genes to produce at least one recombinant protein. The nucleic acid(s) encoding the protein(s) of the present invention can be introduced by any means known to the art which is appropriate for the particular type of cell, including without limitation, transformation, lipofection, electroporation or any other methodology known by those skilled in the art.

[0084] Having generally described this invention, the same will be better understood by reference to certain specific examples, which are included herein to further illustrate the invention and are not intended to limit the scope of the invention as defined by the claims.

### EXAMPLES

[0085] The present disclosure is described in further detail in the following examples which are not in any way intended to limit the scope of the disclosure as claimed. The attached figures are meant to be considered as integral parts of the specification and description of the disclosure. The following example is offered to illustrate, but not to limit the claimed disclosure.

### Example 1: Upstream Cytokinin Responsive Cis-Elements are Required for NIN Expression in the Pericycle to Allow Full Complementation

[0086] The following example describes the identification of cis-regulatory cytokinin responsive elements located in the NIN 5′-upstream region, which are required for nodule primordium formation in M. truncatula. The importance of this region was demonstrated by complementing the M. truncatula nin-1 mutant.

### Materials and Methods

[0087] Plant material and growth, hairy root transformation and inoculation with rhizobia: M. truncatula ecotype Jemalong A17 was used as the wild type plant. Agrobacterium rhizogenes (A. rhizogenes) msu440 mediated hairy root transformation was performed as described in Limpens et al., 2004 (Limpens et al., J. Exp. Bot., (2004) 55, 983-992). M. truncatula plants were grown in perlite saturated with low nitrate [0.25 mM Ca(NO₃)₂] containing Färhaeus (Fä) medium at 21° C. and 16 h light/8 h dark regime. Following one week of growth, plants were inoculated with Sinorhizobium meliloti (S. meliloti) RCR2011 constitutively expressing GFP (strain RCR2011.pHC60) or carrying the PronifH:GFP reporter, whereby these reporters were used for experimental purposes but were not required for complementation (OD₆₀₀=0.1, 2 mL per plant). Plants growing on Fä plates were spot-inoculated with 0.5 μL of rhizobium suspension per root.

[0088] Constructs: Various segments of the DNA of the NIN gene (including the 3′UTR) and promoter regions were generated with PCR using M. truncatula genomic DNA as a template, Phusion high-fidelity DNA polymerase (Finnzymes) and the primers listed in Table 1. The DNA segments used for pENTR-D-TOPO cloning (Invitrogen) were amplified with a forward primer containing an extra 5′-CACC sequence. Forward primers containing an attB4 site (GGGGACAACTTTGTATAGAAAAGTTGNN, SEQ ID NO:627) and reverse primers with an attB1 site (GGGGACTGCTTTTTTGTACAAACTTGN, SEQ ID NO:628) were used to generate DNA segments for cloning into the vector pDONOR P4-P1 by BP recombination (Invitrogen). The forward primers with attB2 (GGGGACAGCTTTCTTGTACAAAGTGGAA, SEQ ID NO:629) and reverse primers with attB3 (GGGGACAACTTTGTATAATAAAGTTGC, SEQ ID NO:630) were used to amplify DNA fragments for cloning into the vector pDONOR P2-P3. Two rounds of PCR were used to generate three deletions corresponding to the three domains (D1, D2, and D3) in the cytokinin response elements containing (CE) region, as well as deletion of the putative CYCLOPS binding site in the −5 kb region (see, e.g., FIGS. 5A-5C). In the first round of PCR, the two DNA fragments separated by the deletion were amplified with specific primers to introduce 15 bp overhang. The following specific primers were used in the first round of PCR: ProNIN-ΔD1-R and ProNIN-ΔD1-F (to generate a deletion in the D1 domain), ProNIN-ΔD2-R and ProNIN-ΔD2-F (to generate a deletion in the D2 domain), ProNIN-ΔD3-R and ProNIN-ΔD3-F (to generate a deletion in the D3 domain), and ProNIN-ΔCYCLOPS-R and ProNIN-ΔCYCLOPS-F (to generate a deletion in the CYCLOPS binding site) (Table 1). Subsequently, the PCR products were purified and mixed, and 5 μL, of the mixture generated in the first round of PCR was used as a template for the second round of PCR. In the second round of PCR, the primers ProNIN-CE-F and ProNIN-CE-R, ProNIN-5 kb-F and ProNIN-0kb-R, or ProNIN-2.2 kb-F and ProNIN-0kb-R (Table 1) were used to generate a single amplicon with a deletion in the CE, −2.2 kb, or −5 kb region. The Entry vectors were recombined into the modified Gateway binary vector pKGW-RR-MGW (Ovchinnikova et al., Spp. Mol. Plant. Microbe. Interact., (2011) 24, 1333-1344) using Multisite LR recombination (Invitrogen). The constructs generated using the primers listed in Table 1 were ProNIN_{2.2kb}:NIN, ProNIN_{5kb}:NIN, ProNIN_{5kb(Δcyclops)}:NIN, ProNIN_{3C-5kb}:NIN, ProNIN_{CE-5kb}:NIN, ProNIN_{CE-3.5Smin}:NIN, ProNIN_{CE(ΔD1)-5kb}:NIN, ProNIN_{CE(ΔD2)-5kb}:NIN, and ProNIN_{CE(ΔD3)-5kb}:NIN.

TABLE 1
Primer sequences

| Name | Sequence (5′ → 3′) |
|---|---|
| JH5.17-F | GACATCTTTCGTTGGTGGCAA |
| | (SEQ ID NO: 526) |
| JH5.17-R | TCGATGTTTTTCGGGGGTGT |
| | (SEQ ID NO: 527) |
| NINg-F | GGGGACAGCTTTCTTGTACAAAGTGG |
| | AAATGGAATATGGTGGTGGGTTAGTG |
| | (SEQ ID NO: 528) |
| NINg-R | GGGGACAACTTTGTATAATAAAGTTGCGA |
| | ACAAAATAGTTTATGTAATCACAAAGAC |
| | (SEQ ID NO: 529) |
| ProNIN- | CACCGTGGTACCCACTCAATGGTA |
| 2.2kb-F | (SEQ ID NO: 530) |
| ProNIN- | CACCTACTCTATTAGTGCTACCTT |
| 5kb-F | (SEQ ID NO: 531) |
| ProNIN- | CCTTATAATTAAAGTTGTTTCTCAGATC |
| 0kb-R | (SEQ ID NO: 532) |
| ProNIN- | GGGGACAACTTTGTATAGAAAAGTTGGTC |
| 3C-F | ATGGCTTGTCCAACAAC |
| | (SEQ ID NO: 533) |
| ProNIN- | GGGGACTGCTTTTTTGTACAAACTTGCTT |
| 3C-R | TCCCGCATGATACTCAACG |
| | (SEQ ID NO: 534) |
| ProNIN- | GGGGACAACTTTGTATAGAAAAGTTGGCA |
| CE-F | ACAACGCACAACTCGTAC |
| | (SEQ ID NO: 535) |
| ProNIN- | GGGGACTGCTTTTTTGTACAAACTTGGTT |
| CE-R | GCTAACGAGTGCCTTCATG |
| | (SEQ ID NO: 536) |
| ProNIN- | CAATCAGTGTTAACGTTCTATTATACTATA |
| ΔD1-R | (SEQ ID NO: 537) |
| ProNIN- | TATAGTATAATAGAACGTTAACACTGATTG |
| ΔD1-F | (SEQ ID NO: 538) |
| ProNIN- | GTCTCAAGAGCAGTGGATCTGCTTAAGTAA |
| ΔD2-R | (SEQ ID NO: 539) |
| ProNIN- | TTACTTAAGCAGATCCACTGCTCTTGAGAC |
| ΔD2-F | (SEQ ID NO: 540) |
| ProNIN- | TTTTAGTTATAATAGGAACATGTCTGATCA |
| ΔD3-R | (SEQ ID NO: 541) |
| ProNIN- | TGATCAGACATGTTCCTATTATAACTAAAA |
| ΔD3-F | (SEQ ID NO: 542) |
| ProNIN- | GGGCCATCTCTCTGCTTCTACAAATTTTCT |
| ΔCYCLOPS-R | (SEQ ID NO: 543) |
| ProNIN- | AGAAAATTTGTAGAAGCAGAGAGATGGCCC |
| ΔCYCLOPS-F | (SEQ ID NO: 544) |
| NIN- | ATTGCAAGGCGATTTAACCTAACA |
| qPCR-F | (SEQ ID NO: 545) |
| NIN- | GAGAGGGGAAGCTTGAAAAAGAGA |
| qPCR-R | (SEQ ID NO: 546) |
| NF-YA1- | TATGGAGGAGACTCTTGTGG |
| qPCR-F | (SEQ ID NO: 547) |
| NF-YA1- | GGTTGCTTGATGATTTGGTG |
| qPCR-R | (SEQ ID NO: 548) |
| ACTIN2- | TGGCATCACTCAGTACCTTTCAACAG |
| qPCR-F | (SEQ ID NO: 549) |
| ACTIN2- | ACCCAAAGCATCAAATAATAAGTCAACC |
| qPCR-R | (SEQ ID NO: 550) |

Sequences designated in bold were added to primers
for TOPO cloning or BP recombination.

[0089] Histological analysis and microscopy: The transgenic roots carrying ProNIN:GUS constructs were incubated in GUS buffer [3% sucrose, 10 mM EDTA, 2 mM k-ferrocyanide, 2 mM k-ferricyanide, 0.5 mg/mL X-Gluc in 0.1M phosphate buffer (pH=7)] at 37° C. for 1-2 hours. Plant tissue embedding in plastic, sectioning and staining were performed as described in Xiao et al. (Xiao et al., Development, (2014) 141, 3517-3528). Sections were analyzed using a DM5500B microscope equipped with a DFC425C camera (Leica). Bright-field and fluorescence images of transgenic roots and nodules were taken using a stereo macroscope (M165 FC, Leica). Confocal images were taken using a SP8 (Leica) microscope. 488 nm and 543 nm excitation wavelengths were used for GFP and propidium iodide respectively.

[0090] RNA isolation and qRT-PCR: RNA was isolated from one week old M. truncatula A17 and daphne-like roots using the EZNA Plant RNA mini kit (Omega Bio-tek, Norcross, Ga., USA). 1 μg of isolated RNA was used for cDNA synthesis with the iScript cDNA synthesis kit (Bio-Rad). Real-time qPCR was performed in 10 μl reactions using SYBR Green Supermix (Bio-Rad) and a CFX real-time system (Bio-Rad). Gene expression levels were determined using the primers listed in Table 1 designated with “qPCR” in the primer name. The gene expression levels were normalized using ACTIN2 as a reference gene.

[0091] Expression induction using cytokinin: To determine whether gene expression was induced by cytokinin, roots of M. truncatula A17 (WT) and daphne-like were treated with either 10⁻⁷M benzylaminopurine (BAP) or water for 16 hours. Then, qRT-PCR analysis of the genes NIN and NF-YA1 was performed using the primers listed in Table 1. This experiment was repeated for a total of three biological replicates.

[0092] Quantification of colonies, infection threads, and nodules: To quantify the number of curled root hairs containing colonies or infection threads, more than 20 transgenic roots (5-10 cm long) were cut into fragments of ˜1 cm and randomly selected for counting. To quantify the nodule number per root, 5-10 cm long transgenic roots were selected.

[0093] RNA in situ hybridization: M. truncatula roots were fixed with 4% paraformaldehyde mixed with 3% glutaraldehyde in 50 mM phosphate buffer (pH=7.4) and embedded in paraffin (Paraplast X-tra, McCormick Scientific). Root sections of 7 μm were prepared by RJ2035 microtome (Leica). RNA in situ hybridization was conducted using Invitrogen ViewRNA™ ISH Tissue 1-Plex Assay kits (ThermoFisher Scientific) according to directions in the user manual (Available at cdn.panomics.com under the directory downloads/17400RevF %20140822_ViewRNA%20ISH%20Tissue%201-Plex.pdf). RNA ISH probe sets were designed and synthesized by request at ThermoFisher Scientific. Catalog numbers of probes were VF1-20312 for Mt NIN, VF1-6000865 for Mt CRE1, VF1-6000866 for Mt RR1, and VF-20311 for Mt NF-YA1. A typical probe set consisted of ˜20 pairs of oligonucleotide probes (20 nt long) that hybridized to specific regions across the target mRNA. Each probe was composed of a region of ˜20 nucleotides, a short linker region and a tail sequence. The two tail sequences (double Z) together formed a site for signal amplification. Such design ensured increased background control by reducing the chance of a nonspecific hybridization event being amplified. For the nodulation specific genes, non-inoculated roots were used as a negative control. For ISH with CRE1 and RR1 performed on non-inoculated roots, an ENOD2 (nodule specific gene) probe set was used as a negative control. Images were taken with an AU5500B microscope equipped with a DFC425c camera (Leica).

[0094] Map-based cloning of daphne-like: A segregating F2 population was made from a cross between M. truncatula FN8113 (cv Jemalong A17) and M. truncatula Jemalong A20 (118 plants). This population showed an approximate 3:1 ratio of Nod+:Nod− plants (118 F2 plants; 84 Nod+: 34 Nod−). The 3:1 ratio indicated that FN8113 had a single recessive mutation responsible for its Nod− phenotype. DNA was extracted using the standard CTAB DNA miniprep method. Simple sequence repeat markers (SSR) based on Mun et al. (Mun et al., Genetics, (2006) 172, 2541-2555) were first used to determine the global chromosomal location of the FN8113 locus. The mutation was shown to be located at the end of chromosome 5, where NIN is located. Subsequently, additional SSR markers were developed for the FN8113 locus on chromosome 5, and used for chromosome walking. PCR was performed using 100 ng of genomic DNA, and analyzed on 2.5% agarose gels. The SSR marker JH5.17 (Table 1) on BAC clone CU424494 showed the closest linkage to the FN8113 locus. No cross-overs were found at the distal end of chromosome 5. Next, whole genome sequencing (Illumina Hiseq2000, paired-end) was used to identify mutations in the genomic region identified from the genetic mapping. This revealed a translocation of a ˜2.49 Mbp region from chromosome 2 into chromosome 5, inserted 4120 bp upstream of the NIN start codon (−4120). In addition, a small deletion of 15 bp between −4121 and −4135 was detected (FIG. 1H). No mutations were found in the NIN coding sequence. Genomic sequence of the mutated region is provided as SEQ ID NO:525. Cleaned DNA sequence reads were mapped against the M. truncatula genome published by Young et al. (Young et al., Nature, (2011) 480, 520-524) using the bwa mem algorithm (Li and Durbin, Bioinformatics, (2010) 26, 589-595). Clipped reads and mismapped mate pairs revealed an inter-chromosomal translocation, which was further confirmed by aligning reads spanning the mutation to the genome using BLASTN.

[0095] Alignment of the upstream regions of NIN: Most of this work was carried out using Geneious v8.1.9 (https://www.geneious.com) (Kearse et al., Bioinformatics, (2012) 28, 1647-1649). The M. truncatula NIN protein sequence was BLASTed against custom BLAST databases using Geneious v8.1.9 (Altschul et al., J. Mol. Biol., (1990) 215, 403-410; Kearse et al., Bioinformatics, (2012) 28, 1647-1649). A diverse selection of legume species with a good quality of publicly available genomic sequences were used: Medicago truncatula (Young et al., Nature, (2011) 480, 520-524), Lotus japonicus (Sato et al., DNA Res., (2008) 15, 227-239), Arachis duranensis (Bertioli et al., Nat. Genet., (2016) 48, 438-446), Cicer arietinum (Varshney et al., Nat. Biotechnol., (2013) 31, 240-246), Glycine max (Schmutz et al., Nature, (2010) 463, 178-183), Lupinus angustifolius (Hane et al., Plant Biotechnol. J., (2017) 15, 318-330), Cajanus cajan (Varshney et al., Nat. Biotechnol., (2012) 30, 83-89), and Trifolium pratense (De Vega et al., Sci. Rep., (2015) 5). Selected NIN scaffolds (Table 2) and up to 80 kb upstream and 10 kb downstream of NIN were extracted from the genomes of these legume species. Selected sequences were custom aligned using mVISTAs web based alignment tool (http://genome.lbl.gov/vista/mvista; Frazer et al., Nucleic Acids Res., (2004) 32, 273-279). The alignment program selected was the shuffle-lagan global alignment program which detects rearrangements (Brudno et al., Bioinformatics, (2003) 19, i54-i62). Apart from this larger scale alignment, individual alignments were made using MAUVE as a Geneious plugin (Darling et al., Genome Res., (2004) 14, 1394-1403), which allowed for more precise determination of conserved sequences relative to the NIN start codon in all species. A complete overview of detected conserved regions can be found in Table 2.

TABLE 2
Sequence information of aligned species

| | | | | Putative | | | |
|---|---|---|---|---|---|---|---|
| | | Pseudo- | | CYCLOPS | Location of three conserved regions (3C) (−bp) † | | |
| | Genome | chromosome/ | NIN gene | binding site | | Region 2/ | |
| Species | version | scaffold id | annotation | (−bp) † | Region 1 | CE Region | Region 3 |
| Arachis | Aradu_v1.0 | Aradu.A07 | Aradu.46M2Y | 1102 . . . 1114 | 12755 . . . 12939 | 13822 . . . 14280 | ND‡ |
| duranensis | | | | | | | |
| Cicer | Cicer_ | Ca2 | Ca_09832 | 1467 . . . 1481 | 12144 . . . 12314 | 12503 . . . 13011 | 14593 . . . 15207 |
| arietinum | arietinum_ | | | | | | |
| | GA_v1.0 | | | | | | |
| Lotus | Lj3.0 | Chr2 | Lj2g3v3373100 | 945 . . . 957 | 42126 . . . 42392 | 44723 . . . 45273 | 48459 . . . 48904 |
| japonicus | | | | | | | |
| Glycine max* | Wm82.a2.v1 | Gm02 | Glyma.02g311000. | 640 . . . 652 | 9258 . . . 9544 | 11271 . . . 11783 | ND‡ |
| | Wm82.a2.v1 | Gm04 | Glyma.04g000600 | 2241 . . . 2257 | 8536 . . . 8814 | 10738 . . . 11278 | ND‡ |
| Lupinus | Lupinus_ | NLL-02 | Lup019181.1 | 886 . . . 900 | 4800 . . . 5162 | 6439 . . . 6774 | ND‡ |
| angustifolius* | angustifolius_ | | | | | | |
| | pschrom_v1.0 | | | | | | |
| | | NLL-011 | Lup029716.1 | 590 . . . 614 | 4111 . . . 4507 | 4617 . . . 4874 | ND‡ |
| Cajanus | PigeonPea. | Scaffold133201 | C.cajan_37712 | 1396 . . . 1410 | 18677 . . . 18772 | 23796 . . . 24273 | ND‡ |
| cajan* | scafSeq. | | | | | | |
| | LG_V5.0 | | | | | | |
| | | Scaffold132542 | C.cajan_33924 | 7032 . . . 7046 | 17957 . . . 19089 | 23574 . . . 24225 | 26.361 . . . 26599 |
| Trifolium | redclover_v2.1 | Tp57577_ | TP57577_TGAC_ | 2216 . . . 2230 | 12254 . . . 12463 | 15497 . . . 16132 | 17392 . . . 18136 |
| pratense | | TGAC_v2_LG4 | v2_gene_18624 | | | | |
| Medicago | JCVI.Medtr. | Chr5 | Medtr5g099060 | 3026 . . . 3040 | 15769 . . . 15985 | 17611 . . . 18083 | 18654 . . . 19153 |
| truncatula | v4.20130313 | | | | | | |

*Glycine max, Lupinus angustifolius and Cajanus cajan have two NIN genes. Glycine max Gm04, Lupinus angustifolius NLL-011, and Cajanus cajan Scaffold132542 were not used for alignment (below).
† The relative position of conserved regions compared to M. truncatula was scored for each scaffold based on MAUVE alignments. Regions are annotated relative to NIN start codon.
‡ND, not detected.

[0096] Alignment of CE regions and prediction of binding sites: Detected conserved sequences of CE regions for selected scaffolds (Table 2) were aligned using MAFFTv7.017 as Geneious plugin (Katoh, Nucleic Acids Res., (2002) 30, 3059-3066). Conserved binding sites were predicted using PlantPAN2.0 (Chow et al., Nucleic Acids Res., (2016) 44, D1154-D1164). Some sites were manually added based on homology with previously published putative B-type RR binding sequences (Heyl and Schmülling, Curr. Opin. Plant Biol., (2003) 6, 480-488; Hosoda et al., Plant Cell, (2002) 14, 2015-2029; Imamura et al., Plant Cell Physiol., (2003) 44, 122-131).

### Results

[0097] Isolation of a novel M. truncatula nin mutant in which infection and nodule organogenesis are uncoupled: Nod-mutant FN8113 was identified by screening a plant population obtained from fast neutron bombardment mutagenized M. truncatula seeds (Noble Research Institute, LLC., Ardmore USA). This mutant was named daphne-like because its phenotype was strikingly similar to that of the L. japonicus daphne mutant. As shown in FIGS. 1D and 1E, three weeks after inoculation with S. meliloti, daphne-like showed excessive infection thread formation relative to WT (FIGS. 1A and 1B), but nodulation was strongly impaired relative to wild type. The root hair curling of daphne-like (FIG. 1F) resembled that of WT (FIG. 1C), in that entrapped bacteria formed colonies and infection threads were formed. The infection thread numbers in WT roots and daphne-like roots were quantified two weeks after inoculation; this showed that infection thread number was more than ten-fold higher in daphne-like than in WT (FIG. 1I). The majority of infection threads were arrested in daphne-like root hairs, but longitudinal sections of roots showed that a few infection threads (indicated by arrows) could reach cortical cell layers (FIG. 1G). FIG. 1G also shows that occasionally some cortical cells divided locally around infection threads (indicated by arrow heads). However, cell divisions were not induced in the inner root cell layers where nodule primordia are initiated in WT plants.

[0098] The 5 kb upstream region of Mt NIN contains discrete regulatory sequences for root hair curling and infection: The phenotype of daphne-like indicated that NIN regulatory sequences required for primordium formation were located more than 4120 bp upstream of its start codon. In addition, the phenotype indicated that the regulatory sequences located within this 4120 bp region were sufficient for proper root hair curling and infection thread formation. To confirm this, the 5 kb region upstream of the start codon was used to drive expression of NIN. ProNIN_{5kb}:NIN was introduced into M. truncatula nin-1 (null mutant) (Marsh et al., Plant Physiol., (2007) 144, 324-335) roots by A. rhizogenes-mediated root transformation. Four weeks post-inoculation (4 wpi), 41 out of 44 analyzed transgenic roots showed excessive infection thread formation (FIGS. 2B-2D). Despite the numerous infections, these roots did not form nodules, except one root on which 4 nodules were observed (FIGS. 2B-2D). Longitudinal sections of infected transgenic roots confirmed that cell divisions were not induced in pericycle, endodermis, and inner cortical cell layers (FIG. 2A). FIG. 2A also shows that infection threads were arrested in the epidermis, but occasionally reached the cortex. These data demonstrate that the 5 kb promoter region is sufficient for infection thread formation, but it lacks regulatory sequences for primordium formation.

[0099] It was previously known that a single putative CYCLOPS/Mt IPD3 binding site was located about −3 kb upstream of the start codon (FIGS. 4A and 5D, Table 2) (Singh et al., Cell Host Microbe, (2014) 15, 139-152). Therefore, a construct was developed where the −2.2 kb upstream region was used to drive NIN expression (the ProNIN_{2.2kb}:NIN construct) to determine whether the function of NIN in the epidermis fully depended on the putative CYCLOPS binding site (FIGS. 5A-5C). This construct was then compared to the ProNIN_{5kb}:NIN construct and empty vector by transforming nin-1 using A. rhizogenes mediated hairy root transformation. As shown in FIGS. 21I-2J, the nin-1 null mutant transformed with empty vector had excessive root hair curling but failed to form infection threads and micro-colonies. All 37 analyzed roots transformed with the ProNIN_{2.2kb}:NIN construct showed tight root hair curls entrapping bacterial colonies, but infection threads were rare (FIGS. 2E-2G). In ProNIN_{2.2kb}:NIN transgenic roots, 298 curled root hairs containing a bacterial colony were analyzed, but only ˜3% had an infection thread. These data show that root hair curling and establishment of infection chambers do not rely on the putative CYCLOPS binding site. In contrast, ˜70% of curled root hairs formed infection threads in ProNIN_{5kb}:NIN transgenic roots (n=324). These results indicated that the −5 kb to −2.2 kb region contained regulatory sequences important for infection thread formation. The observed phenotype was reminiscent of that of L. japonicus and M. truncatula cyclops-3lipd3-2 mutants (Yano et al., Proc. Natl. Acad. Sci. U.S.A., (2008) 105, 20540-20545; Horvath et al., Mol. Plant-Microbe Interact., (2011) 24, 1345-1358). The L. japonicus and M. truncatula cyclops-3lipd3-2 mutants have a phenotype where bacterial colonies are formed in tightly curled root hairs, but infection threads are not formed. Taken together, these results indicate that the −2.2 kb upstream region is sufficient for activating NIN expression in the epidermis at expression levels that result in tight root hair curling. This tight curling allows rhizobia to form a colony inside the pocket of the curl. However, additional regulatory sequences located between −5 kb and −2.2 kb upstream, probably involving the putative CYCLOPS binding site, are required for efficient infection thread formation. To test this, nin-1 roots transformed with NIN driven by the −5 kb promoter in which the putative CYCLOPS binding site was deleted (ProNIN5kb(Δcyclops):NIN) were tested (FIGS. 2K-2M). By deleting the putative CYCLOPS binding site, the number of curled root hairs with a microcolony that formed an infection thread dropped from 70% to 7% (n=434). This result showed that the putative CYCLOPS binding site within the NIN promoter was essential for efficient infection thread formation.

[0100] A conserved region with putative cytokinin response elements is located ˜18 kb upstream of the Mt NIN coding region: As described above, daphne-like as well as nin-1 transformed with ProNIN_{5kb}:NIN were able to induce infection thread formation but not nodule primordium formation. In order to identify remote regulatory regions located upstream of the −5 kb region, the genomic DNA sequences spanning from the start of the NIN coding region to the first upstream gene, of 8 legume species (M. truncatula, L. japonicus, Arachis duranensis, Cicer arietinum, Glycine max, Lupinus angustifolius, Cajanus cajan and Trifolium pratense) were compared. DNA sequences with 3 conserved regions (3C) far upstream of the NIN start codon were identified (FIGS. 3 and 4A, Table 2). In M. truncatula, 3C was located 15-20 kb upstream of the NIN start codon, and in L. japonicus it was located between 42-49 kb upstream (Table 2). The level of similarity observed in conserved parts of 3C were similar to those observed in the NIN coding region (FIG. 3). The second region in 3C was the most conserved and included about 10 putative B-type cytokinin signaling RESPONSE REGULATOR (RR) binding sites (FIGS. 3, 4A, and 5A-5C) (Sheen, Science, (2002) 296, 1650-1652; Heyl and Schmülling, Curr. Opin. Plant Biol., (2003) 6, 480-488; Hosoda et al., Plant Cell, (2002) 14, 2015-2029; Imamura et al., Plant Cell Physiol., (2003) 44, 122-131). This region was therefore named the cytokinin response elements containing (CE) region.

[0101] The CE region contains regulatory elements required for nodule organogenesis: To determine whether the 3C region (˜4 kb) contained regulatory sequences for nodule primordium formation, 3C was fused to the (upstream) −5 kb region (ProNIN_{3C-5kb}:NIN), as the latter was found to be sufficient for infection. ProNIN_{3C-5kb}:NIN was introduced into nin-1 by A. rhizogenes mediated hairy root transformation. As shown in FIG. 4B, 21 out of 26 analyzed transgenic roots formed ˜8 nodules per root. As described above, the CE region (˜1 kb) was found to contain several putative cytokinin response elements. In order to determine whether the CE region was sufficient to trigger primordium formation, nin-1 was transformed with the CE region fused to the −5 kb region driving NIN (ProNIN_{CE-5kb}:NIN). As shown in FIG. 4B, 18 out of 37 transgenic roots formed ˜8 nodules per root. This data demonstrates that the CE region contains regulatory sequences required for primordium formation. Further, the number of nodules formed on ProNIN_{CE-5kb}:NIN expressing roots was similar to that of wild type roots transformed with an empty vector (control) (FIG. 4B). Thus, the data further demonstrates that the autoregulation of nodulation (AON) mechanism is also activated (Soyano et al., Proc. Natl. Acad. Sci. U.S.A., (2014) 111, 14607-14612).

[0102] Pink nodules were formed on nin-1 roots transformed with either ProNIN_{3C-5kb}:NIN or ProNIN_{CE-5kb}:NIN. FIGS. 6A and 6C demonstrate that pink nodules were formed on transgenic roots of nin-1. The pink coloration is from leghemoglobin, and is a hallmark of nodules that are actively fixing nitrogen. FIGS. 6B and 6D show longitudinal sections of those same nodules, which displayed normal nodule zonation, including meristem (M), infection zone (IF), and fixation zone (FX). Nodules induced on ProNIN_{CE-5kb}:NIN transgenic nin-1 roots by inoculation with S. meliloti carrying the PronifH:GFP reporter showed that nifH was expressed in the fixation zone (FIGS. 7A and 7B). Thus, CE in combination with the −5 kb region was sufficient to induce wild type-like nodule organogenesis.

[0103] The daphne-like CE region containing a 2.49 Mbp insertion was unable to contribute to the correct expression of NIN, further indicating the importance of the cytokinin-responsive CE region: Pink nodules were formed on daphne-like roots transformed with ProNIN_{CE-5kb}:NIN (FIG. 6E). 15 of 17 analyzed transgenic roots at 4 wpi formed on average of about seven nodules per root, and the excessive infection phenotype in the daphne-like background was rescued in 11 of these 17 transgenic roots. FIG. 6F shows a longitudinal section of those same nodules, which displayed normal nodule zonation, including meristem (M), infection zone (IF), and fixation zone (FX). This result showed that the daphne-like phenotype was likely caused by the 2.49 Mbp insertion that interfered with the function of the CE region. Thus, it was tested whether the CE region was sufficient to complement nodule organogenesis in daphne-like. To do this, a minimal CaMV 35S promoter (−46 bp) (Benfey and Chua, Science, (1990), 250:959-966) fused to the CE region (ProNINCE-35Smin:NIN) was used to transform daphne-like roots. FIG. 6G demonstrates that pink nodules were formed on the transgenic roots, while FIG. 6H shows longitudinal sections of these same nodules, which displayed normal nodule zonation. 37 out of 45 transgenic daphne-like roots formed on average four nodules per root at 4 wpi. This indicated that the CE region was sufficient to induce nodule organogenesis, but in combination with the −5 kb region more nodules (about seven per root) could be formed. Because the ability to form nodules could be rescued in daphne-like by the CE region driving NIN expression, it seemed likely that the CE region in daphne-like could not control the expression of NIN and further could not be induced by cytokinin. Therefore, the induction of NIN expression by cytokinin and water (as control) in wild type (Jemalong A17) and daphne-like was compared. Compared with the control, 16 hours after 10-7M benzylaminopurine (BAP) application, NIN expression level increased 37 folds and NF-YA1 expression level increased 116 folds in wild-type, while both NIN and NF-YA1 expression levels in daphne-like were not changed (FIGS. 8A-8B). This showed that the CE region was required for the induction of NIN expression by cytokinin, and that the CE region in daphne-like was unable to contribute to the correct expression of NIN.

[0104] A domain with 6 putative cytokinin response elements is essential for nodule primordium formation: Cytokinin was known to be a positive regulator of nodule primordium formation (Suzaki et al., Front. Plant Sci., (2013) 4, 1-6). Therefore, experiments to determine whether the putative cytokinin response elements within the CE region were essential for primordium formation were conducted. To this end, several deletions in the CE region were made. The CE region contains a 472 bp region that is highly conserved in all 8 studied legume species (FIGS. 3, 4A, and 5A-5C). The 472 bp region was divided into 3 parts: domain 1 to 3 (D1 to D3). D1 and D3 were found to contain six and three putative cytokinin response elements respectively, whereas D2 contained a putative AP2 binding site as well as a single cytokinin response element (FIGS. 4A and 5A-5C). Transcription factors of the AP2 family, including ERN (Ethylene response factor Required for Nodulation) are involved in regulating nodulation (Andriankaja et al., Plant Cell, (2007) 19, 2866-2885; Middleton et al., Plant Cell Online, (2007) 19, 1221-1234; Wang et al., Plant Cell, (2014) 26, 4782-4801). To investigate their respective contribution to nodule primordium formation, D1, D2 or D3 were separately deleted from the 1 kb CE region (FIGS. 4A and 5A-5C), and these modified CE regions were fused to the −5 kb region to drive NIN expression. The 3 constructs were introduced into nin-1 by A. rhizogenes mediated root transformation. As shown in FIGS. 4B and 9A, deletion of D1 eliminated the ability to form nodules, whereas deletion of D2 had no significant effect on nodulation (FIGS. 4B and 9B). Deletion of D3 caused a reduction of the relative number of roots with nodules from 49% to 21% and also reduced the average nodule number per root from 8 to 5.4 (FIGS. 4B and 9C). These results showed that at least regulatory sequences in D1 were essential for NIN-controlled nodule primordium formation. Further, the data indicated that the putative cytokinin response elements within D1 were responsible for NIN controlled nodule primordium formation. In contrast, the putative AP2 binding site in D2 was not essential for nodule organogenesis.

[0105] NIN expression is induced in inner root cell layers in a non-cell-autonomous way: The 2.2 kb upstream region of Mt NIN was known to be activated in the epidermis 24 hours after Nod factor application (Verne et al., Plant Cell, (2015) 27, 3410-3424). This promoter region, however, lacked the regulatory sequences shown to be required for nodule organogenesis (see above). Therefore, the expression of NIN in inner root cell layers during primordium formation was assessed via in situ hybridization. Analysis was conducted using the primordial stage in which the pericycle cells had divided and some anticlinal divisions had occurred in the inner cortical cell layers (C4 and C5) (stage used in FIGS. 10A and 10B). Analysis was also conducted on a slightly later stage when cortical cells had divided more extensively (stage used in FIGS. 10C and 10D). At both stages, the infection thread had not yet reached the primordia. As shown in FIG. 10A, at the younger stage, NIN mRNA occurred in pericycle and epidermis, but was hardly detectable in the divided cortical cells. The highest expression level occurred in the pericycle derived cells. As shown in FIG. 10C, at the older stage when cortical cells had divided more extensively, the expression level of NIN in cortex derived cells was similar to that in the pericycle. The data show that expression of NIN was first strongly induced in the pericycle, and then extended to the other inner cell layers.

[0106] NF-YA1 is a direct target of NIN (Soyano et al., PLos Genet. (2013) 9). Like NIN, NF-YA1 is expressed in the epidermis where it controls rhizobial infection (Laporte et al., J. Exp. Bot., (2014) 65, 481-494). To test whether NIN also controlled NF-YA1 expression in the primordia, RNA in situ hybridization was performed using NF-YA1 as a probe. The results demonstrated that NF-YA1 and NIN had similar expression because NF-YA1 was first induced in pericycle (FIGS. 10B and 10D). These similar expression patterns indicate that NF-YA1 may be regulated by NIN in pericycle and other nodule primordium cells. Further, the results indicate that rhizobia present in the epidermis induce NIN and NF-YA1 expression in the pericycle derived cells.

[0107] CE region is required for induction of NIN expression in pericycle: To determine whether the CE region is required for NIN expression in the inner cell layers, the expression patterns of ProNIN_{CE-5kb}:GUS and ProNIN_{5kb}:GUS were compared. Initially, both ProNIN_{CE-5kb}:GUS and ProNIN_{5kb}:GUS were introduced into A17 WT M. truncatula. Analysis was conducted on an early stage of primordium development when pericycle cells had divided and some anticlinal divisions had occurred in the inner cortical cell layers. As shown in FIGS. 11A and 11B, both constructs were expressed in the epidermis, pericycle, and endodermis while a lower signal was detected in some cortical cells. This result was unexpected given that ProNIN_{5kb}:NIN was shown to not be sufficient for primordium formation in the nin-1 background. The results indicate that expression of ProNIN_{5kb}:GUS in inner cell layers was induced by endogenous NIN that was produced in the WT background. The results further indicate that NIN expression in the inner layers is regulated by a positive feedback loop involving NIN itself, and that the essential cis-regulatory elements required for this were located in the −5 kb promoter region.

[0108] To confirm the above, ProNIN_{CE-5kb}:GUS and ProNIN_{5kb}:GUS were introduced into daphne-like by A. rhizogenes mediated transformation. In daphne-like, infection threads were formed indicating that NIN was induced in the epidermis and that the production of the mobile signal was not affected. However, nodule primordium formation was impaired, indicating there was no NIN production in the inner cell layers. Indeed, ProNIN_{5kb}:GUS transgenic roots showed GUS expression only in the epidermis and outer cortex (FIG. 11C), whereas no expression was observed in the pericycle cells. In contrast, ProNIN_{CE-5kb}:GUS transgenic roots showed GUS expression in the epidermis, outer cortex and in the pericycle (FIG. 11D). In addition, the expression of ProNIN_{CE-5kb}:GUS in the pericycle of daphne-like was weak which is consistent with the involvement of NIN in a feedback loop that positively regulates its own expression. In this case, cell division was not induced in the pericycle, due to the absence of NIN. To further demonstrate that the CE region was required for NIN expression in the pericycle, NIN expression in daphne-like primordia was examined using RNA in situ hybridization at 2 days post inoculation (dpi) with rhizobia (FIG. 10E). This showed that, unlike in WT (FIG. 10A), NIN was expressed in the epidermis and outer cortex but not in the pericycle (FIG. 10E). This result indicated that the CE region was required for NIN expression in the pericycle. Taken together, the results demonstrate that CE-controlled NIN expression in the pericycle precedes cell division in WT roots. The results indicate that the CE region is required for the initial induction of NIN expression in the pericycle.

[0109] Induction of NIN in the pericycle depends on NIN expression in the epidermis: The results above indicated that a mobile signal generated by Nod factor signaling in the epidermis induces NIN expression in the pericycle. In this case, NIN expression in the pericycle would depend on NIN induction in the epidermis. To test this, ProNIN_{CE-5kb}:GUS and ProNIN_{5kb}:GUS were introduced into nin-1 by hairy root transformation. In both cases, GUS was only present in the epidermis and outer cortex, but not in the pericycle 3 dpi (FIGS. 11E and 11F). Therefore, the data suggest that NIN was required in the epidermis to induce NIN expression in pericycle cells.

[0110] CRE1 and RR1 are expressed in the pericycle of non-inoculated roots: The occurrence of multiple B-type RR response regulatory elements in the CE region indicated that the cytokinin signaling machinery was important for NIN transcriptional activation in the pericycle. To determine whether this was in fact the case, the expression pattern of the cytokinin receptor CRE1 and its putative target the B-type RESPONSE REGULATOR RR1, which is expressed during nodule formation (Gonzalez-Rizzo et al., Plant Cell Online, (2006) 18, 2680-2693), were assessed. Using RNA in situ hybridization, it was found that CRE1 was actively transcribed in pericycle and vasculature cells of the non-inoculated roots, but not in endodermis or cortical cells (FIG. 12A). Also, mRNA of the B-type RR1 was present at the highest level in pericycle, and to a lower extent in root vasculature cells (FIG. 12B). Therefore, both CRE1 and RR1 were already expressed in the pericycle before rhizobial signaling started, indicating that initially only the pericycle layer was responsive to cytokinin.

[0111] Summary: The data presented above shows that a remote upstream regulatory region (CE) is required for the regulation of NIN expression leading to M. truncatula nodule organogenesis. The data further show that regulatory sequences for the infection process are located within a 5 kb region directly upstream of the start codon. The CE region contains several cytokinin response elements and domain 1 (D1), which contains six cytokinin response elements, is essential for nodule primordia formation. The CE region is furthermore important for the cytokinin-induced expression of NIN as the daphne-like mutant, which has an insertion disrupting CE function, has lost this ability. Nodule primordium formation starts with the induction of NIN in the pericycle and subsequently extends to the cortical cells. Further, the data demonstrate that cytokinin-linked genes CRE1 and RR1 are expressed in the pericycle. Taken together, the results indicate that cytokinin perception is involved in the induction of NIN at the start of primordium formation.

[0112] During the infection process, NIN is involved in a mechanism by which root hair growth stops when a proper curl is formed. Regulatory sequences required for this process are located within the −2.2 kb promoter region, which lacks the putative CYCLOPS binding site. Therefore, the data indicate that in addition to CYCLOPS (IPD3 in M. truncatula) another transcription factor(s) is involved in regulating NIN expression in the epidermis. Further, given that induced expression of the −2.2 kb region is not sufficient for efficient infection thread formation, the data indicate that the expression level of NIN in the epidermis remains below the threshold level required for infection thread formation, whereas the threshold level of NIN expression can be reached by induced expression of the −5 kb promoter region which includes the putative CYCLOPS binding site (FIG. 13).

[0113] A model for NIN function during nodule primordium initiation is depicted in FIG. 13. After perception of Nod factor, NIN is rapidly induced in the epidermis. The −5 kb regulatory region of the NIN promoter is sufficient for both, tight root hair curling and infection thread formation, whereas expression driven by the −2.2 kb region is only sufficient for tight root hair curling and the formation of bacterial colonies inside curl. A mobile signal is generated in the epidermis in a NIN-dependent manner and it translocates to the pericycle, where it causes cytokinin accumulation in the inner root cell layers. The CRE1 receptor in the pericycle perceives cytokinin and activates the B-type RR1, which further activates NIN expression. The induction of NIN in the pericycle requires the presence of the CE region and involves a positive feedback loop which includes NIN itself. The conclusion that the induction of NIN in the pericycle involves a positive feedback loop which includes NIN itself is supported by the observation that expression of ProNIN_{5kb}:GUS, in M. truncatula wild type background, is induced in nodule primordia although this promoter region is not sufficient to trigger primordium formation. This result is similar to a study in L. japonicus in which a promoter region of NIN that does not trigger primordium formation is sufficient to drive expression of GUS in primordia (Yoro et al., Plant Physiol., (2014) 165, 747-758; Heckmann et al., Mol. Plant-Microbe Interact, (2011) 24, 1385-1395; Kosuta et al., Plant J., (2011) 67, 929-940). NIN then directly activates NF-YA1 expression, and further stimulates cell divisions. The data indicate that NIN induction in the pericycle precedes the mitotic activation of pericycle cells. Later, the NIN-induced response in the pericycle contributes to cell division and NIN expression in the endodermis and pericycle cells.

[0114] The conclusion that nodule primordium formation requires the induction of NIN expression in inner root layers is consistent with the observation that nodule organogenesis is restored in the L. japonicus daphne mutant by NIN driven by a heterologous Arabidopsis enhancer that is active in endodermis and cortex (Yoro et al., Plany Physiol., (2014) 165, 747-758). The results above demonstrate that deletion of a region within CE containing six cytokinin response elements blocks primordium formation. This shows that cytokinin signaling in the pericycle induces NIN expression. This is further supported by the expression of the cytokinin receptor (CRE1) as well as B-type response regulator (RR1) in the pericycle before rhizobial signaling is initiated. These findings are in line with a previous study showing that a CRE1 promoter region driving GUS expression is specifically expressed in endodermis/pericycle cells opposite the protoxylem poles (Boivin et al., Plant Cell Environ., (2016) 39, 2198-2209), the sites where nodule primordia are formed (Heidstra et al., Development, (1997) 124, 1781-1787). Moreover, the importance of the CE region for cytokinin induced NIN expression is indicated by the daphne-like mutant which has lost this ability.

[0115] The CE region is conserved in the eight studied legume species. They belong to different clades of the legume Papilionoideae subfamily, representing the Genistoids, IRLC, Robinioids, Milletioids, and Dalbergioids clades. Therefore, the data indicate that regulation of NIN expression by cytokinin is conserved in this subfamily.

[0116] The results above show that after the induction of NIN in the pericycle, its expression extends to the endodermis and inner cortex. In young nodule primordia in which cortical cells have divided anticlinally (FIGS. 10A and 10B), expression of NIN as well as NF-YA1 are highest in pericycle, and it is hardly detectable in the divided cortical and endodermal cells. The results indicate that NIN induced responses in the pericycle contribute to cell division in endodermis and cortical cells (FIG. 13). At a later stage of development NIN is expressed in the dividing cortical cells (FIGS. 10C and 10D).

[0117] Cell division in nodule primordia correlates with auxin accumulation, which occurs before the first cell division (Mathesius et al., Plant J., (1998) 14, 23-34; Suzaki et al., Development, (2012) 4006, 3997-4006). The auxin accumulation (DR5 expression) depends on NIN, as it does not occur in a nin null mutant (Suzaki et al., Development, (2012) 4006, 3997-4006). Further, ectopic expression of both NIN and NF-YA1 are sufficient to induce abnormal cell division during lateral root development (Soyano et al., PLos Genet. (2013) 9), which indicates that their expression causes the local accumulation of auxin. The data presented above indicate that cytokinin signaling in the pericycle triggers NIN expression leading to the local accumulation of auxin, which subsequently triggers mitotic activity (FIG. 13). This conclusion is supported by a previous study showing that STY genes are targets of NF-YA1 (Hossain et al., Mpmi, (2016) 29, 950-964). STY genes encode transcription factors that have been shown to regulate YUCCA auxin biosynthesis genes in Arabidopsis (Eklund et al., Plant Cell, (2010) 22, 349-363; Eklund et al., Development, (2010) 137, 1275-1284; Sohlberg et al., Plant J., (2006) 47, 112-123).

1. A genetically altered plant, wherein the plant or a part thereof comprises one or more genetic alterations that increase activity of a NODULE INCEPTION (NIN) protein or a NIN-like protein (NLP protein) in response to cytokinin signaling as compared to a wild type (WT) plant without the one or more genetic alterations, and wherein the plant or the part thereof comprises a nucleic acid encoding the NIN protein or the NLP protein.

2. The genetically altered plant of claim 1, wherein the one or more genetic alterations comprise addition of one or more, two or more, three or more, four or more, five or more, six or more, seven or more, eight or more, nine or more, ten or more, eleven or more, twelve or more, thirteen or more, fourteen or more, fifteen or more, sixteen or more, seventeen or more, eighteen or more, nineteen or more, twenty or more, twenty-one or more, twenty-two or more, twenty-three or more, or twenty-four or more cytokinin response elements operably linked to the nucleic acid encoding the NIN protein or the NLP protein.

3. The genetically altered plant of claim 2, wherein at least one of the cytokinin response elements is a B-type cytokinin signaling RESPONSE REGULATOR (RR) binding site.

4. The genetically altered plant of claim 2, wherein the cytokinin response elements are within 100 nucleotides, within 90 nucleotides, within 86 nucleotides, within 80 nucleotides, within 70 nucleotides, within 60 nucleotides, within 50 nucleotides, within 40 nucleotides, within 30 nucleotides, within 25 nucleotides, within 20 nucleotides, within 19 nucleotides, within 18 nucleotides, within 17 nucleotides, within 16 nucleotides, within 15 nucleotides, within 14 nucleotides, within 13 nucleotides, within 12 nucleotides, within 11 nucleotides, within 10 nucleotides, within 9 nucleotides, within 8 nucleotides, within 7 nucleotides, within 6 nucleotides, within 5 nucleotides, within 4 nucleotides, within 3 nucleotides, within 2 nucleotides, or within 1 nucleotide of each other.

5. The genetically altered plant of claim 1, wherein the nucleic acid encoding the NIN protein or the NLP protein is operably linked to a promoter that is operably linked to the cytokinin response elements.

6. The genetically altered plant of claim 5, wherein the promoter and the cytokinin response elements are within 110,000 nucleotides, within 105,000 nucleotides, within 100,000 nucleotides, within 95,000 nucleotides, within 90,000 nucleotides, within 85,000 nucleotides, within 80,000 nucleotides, within 75,000 nucleotides, within 70,000 nucleotides, within 65,000 nucleotides, within 60,000 nucleotides, within 55,000 nucleotides, within 50,000 nucleotides, within 45,000 nucleotides, within 42,000 nucleotides, within 40,000 nucleotides, within 35,000 nucleotides, within 30,000 nucleotides, within 25,000 nucleotides, within 20,000 nucleotides, within 15,000 nucleotides, within 10,000 nucleotides, within 9,000 nucleotides, within 8,000 nucleotides, within 7,000 nucleotides, within 6,000 nucleotides, within 5,000 nucleotides, within 4,000 nucleotides, within 3,000 nucleotides, within 2,000 nucleotides, within 1,000 nucleotides, within 500 nucleotides, within 400 nucleotides, within 300 nucleotides, within 200 nucleotides, or within 100 nucleotides of each other.

7. The genetically altered plant of claim 1, wherein the nucleic acid encodes a NIN/NLP1 orthogroup protein, a NLP2-3 orthogroup protein, a NLP4 orthogroup protein, or a basal NIN/NLP orthogroup protein.

8. The genetically altered plant of claim 1, wherein the nucleic acid encoding the NIN protein or the NLP protein is endogenous.

9. The genetically altered plant of claim 1, wherein the nucleic acid encoding the NIN protein or the NLP protein is heterologous.

10. The genetically altered plant of claim 5, wherein the promoter is endogenous.

11. The genetically altered plant of claim 5, wherein the promoter is heterologous.

12. The genetically altered plant of claim 1, wherein cytokinin signaling or induction of the cytokinin signaling pathway in a root pericycle cell layer, a root endodermis cell layer (i.e., endodermal cell layer), root cortex cell layers (i.e., cortical cell layers), and/or a root epidermis cell layer (i.e., epidermal cell layer) induces nodule organogenesis.

13. The genetically altered plant of claim 1, further comprising one or more CYCLOPS response elements operably linked to the nucleic acid, wherein CYCLOPS expression in a root epidermis cell layer (i.e., epidermal cell layer) induces rhizobium infection.

14. The genetically altered plant of claim 1, wherein the genetically altered plant is a monocot, and wherein the genetically altered plant is selected from the group consisting of corn, rice, wheat, barley, sorghum, millet, oat, and rye.

15. The genetically altered plant of claim 1, wherein the genetically altered plant is selected from the group consisting of apple, pear, plum, apricot, peach, almond, walnut, cherry, strawberry, raspberry, blackberry, red currant, black currant, melon, cucumber, pumpkin, squash, grape, hemp, hops, birch, beech, jujube, cassava, poplar, chestnut, citrus, potato, tomato, sweet potato, Trema spp., and Jatropha spp.

16. A method of producing the genetically altered plant of claim 1, comprising:
a) introducing the one or more genetic alterations into a plant cell, tissue, or other explant;
b) regenerating the plant cell, tissue, or other explant into a genetically altered plantlet; and
c) growing the genetically altered plantlet into a genetically altered plant with the one or more genetic alterations that increase activity of the NIN protein or the NLP protein in response to cytokinin signaling as compared to an untransformed WT plant.

17. The method of claim 16, further comprising identifying successful introduction of the one or more genetic alterations by screening or selecting the plant cell, tissue, or other explant prior to step (b); screening or selecting plantlets between step (b) and (c); or screening or selecting plants after step (c).

18. The method of claim 16, wherein transformation is done using a transformation method selected from the group consisting of particle bombardment, Agrobacterium-mediated transformation, Rhizobium-mediated transformation, and protoplast transfection or transformation.

19. The method of claim 16, where the genetic alterations are introduced with a vector.

20. The method of claim 19, wherein the vector comprises a promoter operably linked to a nucleotide encoding a NIN or NLP protein and one or more cytokinin response elements operably linked to the promoter, and wherein the promoter and the one or more cytokinin response elements are selected from the group consisting of a NIN gene promoter comprising a 5′-upstream sequence comprising a CYCLOPS response element through a transcription start site of the NIN gene operably linked to a 3C region, the NIN gene promoter comprising a 5′-upstream sequence comprising the CYCLOPS response element through to the transcription start site of the NIN gene operably linked to a CE region, a minimal promoter operably linked to a CYCLOPS response element operably linked to a CE region, and a minimal promoter operably linked to a CYCLOPS response element operably linked to one or more cytokinin response elements.

21. The method of claim 19, wherein the vector comprises one or more gene editing components that target a nuclear genome sequence operably linked to an endogenous NIN protein or NLP protein, and wherein the nuclear genome sequence is edited by the one or more gene editing components to introduce a cis-regulatory element selected from the group consisting of one or more cytokinin response elements, a 3C region, and a CE region.

22. The method of claim 21, wherein one or more gene editing components are selected from the group consisting of a ribonucleoprotein complex that targets the nuclear genome sequence; a vector comprising a TALEN protein encoding sequence, wherein the TALEN protein targets the nuclear genome sequence; a vector comprising a ZFN protein encoding sequence, wherein the ZFN protein targets the nuclear genome sequence; an oligonucleotide donor (ODN), wherein the ODN targets the nuclear genome sequence; and a vector comprising a CRISPR/Cas enzyme encoding sequence and a targeting sequence, wherein the targeting sequence targets the nuclear genome sequence.

23. The method of claim 20, wherein the NIN gene promoter, 3C region, CE region, CYCLOPS response element, or one or more cytokinin response elements are from a nodulating legume species, and wherein the nodulating legume species is selected from the group consisting of peanut, pigeon pea, chickpea, soybean, velvet bean, bean, pea, adzuki bean, mung bean, clover, lupine, Lotus japonicus, and Medicago truncatula.

The application's sequence listing, which the Patent Office published only in electronic form, follows.

SEQUENCE LISTING (693 sequences)

SEQ ID NO: 1 - protein, 767 aa, Arabidopsis thaliana
MVGPFKKILHAHNQRFPPSSSSSLDPVVDDSSRKQTRIILSYLLHLSLSLHITYSLCLLHFFFGSSNPFSPMEESNNSAVVDFPDNFMDQLLWEECWEEEATQHDQALSSPSGLKERVACAMGHLQEVMGERELLIQLWVPVETRSGRVLSTEEQPYSINTFSQSQSLALYRDASAGYSFAAEVGSEQLVGLPGRVFLRRMPEWTPDVRFFRKEEYPRIGYARRYQVRATLALPLFQGTSGNCVAVMEMVTTHRNLEYASQLSTICHALEAFDLRTSQTSIVPASLKVTSSSSSSSRTEVASILQGICSSHGLPLAVTWGHQDSSSCLSALISASYAADHGSRCFLAACSEHHLLGGEGIAGRAFATKKQCFATDVAIFSKWSYPLSHYAKMFDLHAALAVPILTRGNRTVQFVLELFFPRDCLDIQTHSLTLASQLKLRFQSSPHLMVDDNQIAEEVRDAATPPLTQEDPKGKQVSFSFSSASSLENRKRKTKAEKDITLDTLRQHFAGSLKDAAKNIGVCPTTLKRICRQNGISRWPSRKIKKVGHSLRKLQVVMDSVEGVQGSLHLASFYSSFPQLQSSSSSSFPFINPTQTVHVPPKSPPSSSGSQSSSGSSTCCSSEEQQLGGFQKPALSHPQLLTLSSMHEDQRPVRVTSSLPPLPSATTPRKAKDGMKVKAMFGDSMLRMSLLPHSRLTDLRREIAKRFGMDDVLRSNFSLKYLDDDQEWVLLTCDADLEECIQVYKSSSLKETIRILVHHPLSRPSFGS

SEQ ID NO: 2 - protein, 844 aa, Arabidopsis thaliana
MEDSFLQSENVVMDADFMDGLLLDGCWLETTDGSEFLNIAPSTSSVSPFDPTSFMWSPTQDTSALCTSGVVSQMYGQDCVERSSLDEFQWNKRWWIGPGGGGSSVTERLVQAVEHIKDYTTARGSLIQLWVPVNRGGKRVLTTKEQPFSHDPLCQRLANYREISVNYHFSAEQDDSKALAGLPGRVFLGKLPEWTPDVRFFKSEEYPRVHHAQDCDVRGTLAIPVFEQGSKICLGVIEVVMTTEMVKLRPELESICRALQAVDLRSTELPIPPSLKGCDLSYKAALPEIRNLLRCACETHKLPLAQTWVSCQQQNKSGCRHNDENYIHCVSTIDDACYVGDPTVREFHEACSEHHLLKGQGVAGQAFLTNGPCFSSDVSNYKKSEYPLSHHANMYGLHGAVAIRLRCIHTGSADFVLEFFLPKDCDDLEEQRKMLNALSTIMAHVPRSLRTVTDKELEEESEVIEREEIVTPKIENASELHGNSPWNASLEEIQRSNNTSNPQNLGLVFDGGDKPNDGFGLKRGFDYTMDSNVNESSTFSSGGFSMMAEKKRTKADKTITLDVLRQYFAGSLKDAAKNIGVCPTTLKRICRQHGIQRWPSRKIKKVGHSLQKIQRVIDSVQGVSGPLPIGSFYANFPNLVSQSQEPSQQAKTTPPPPPPVQLAKSPVSSYSHSSNSSQCCSSETQLNSGATTDPPSTDVGGALKKTSSEIELQSSSLDETILTLSSLENIPQGTNLLSSQDDDFLRIKVSYGEEKIRLRMRNSRRLRDLLWEIGKRFSIEDMSRYDLKYLDEDNEWVLLTCDEDVEECVDVCRTTPSHTIKLLLQASSHHFPERSSATEYSLWH

SEQ ID NO: 3 - protein, 909 aa, Arabidopsis thaliana
MEDDGGSDGGEGNGGFSPNSSFGAFADTAMDLDFMDELLFDGCWLETTDSKSLKQTEQSPSASTAMNDNSPFLCFGENPSQDNFSNEETERMFPQAEKFLLEEAEVGKSWWIAPSASEGPSSSVKERLLQAISGLNEAVQDKDFLVQIWVPIQQEGKSFLTTWAQPHLFNQEYSSLAEYRHVSETYNFPADEGMKDFVGLPGRVFLQKFPEWTPDVRFFRRDEYPRIKEAQKCDVRGSLALPVFERGSGTCLGVVEIVTTTQKMNYRQELEKMCKALEAVDLRSSSNLNTPSSEFLQVYSDFYCAALPEIKDFLATICRSYDFPLALSWAPCARQGKVGSRHSDENFSECVSTIDSACSVPDEQSKSFWEACSEHHLLQGEGIVGKAFEATKLFFVPEVATFSKTNYPLAHHAKISGLHAALAVPLKSKSGLVEFVLEFFFPKACLDTEAQQEMLKSLCVTLQQDFRSSNLFIKDLELEVVLPVRETMLFSENLLCGAETVESLTEIQMQESSWIAHMIKANEKGKDVSLSWEYQKEDPKELSSGRENSQLDPVPNNVPLEAEQLQQASTPGLRVDIGPSTESASTGGGNMLSSRRPGEKKRAKTEKTIGLEVLRQYFAGSLKDAAKSIGVCPTTLKRICRQHGIMRWPSRKIKKVGHSLKKLQLVMDSVQGAQGSIQLDSFYTSFPELNSPNMSSNGPSLKSNEQPSHLNAQTDNGIMAEENPRSPSSSCSKSSGSSNNNENTGNILVAEDADAVLKRAHSEAQLHNVNQEETKCLARTQSHKTFKEPLVLDNSSPLTGSSNTSLRARGAIKVKATFGEARIRFTLLPSWGFAELKQEIARRFNIDDISWFDLKYLDDDKEWVLLTCEADLVECIDIYRLTQTHTIKISLNEASQVKLSGSFGNTGLS

SEQ ID NO: 4 - protein, 963 aa, Arabidopsis thaliana
MEGGRGGGDGNFLPNSNFGVFSDSAMDMDFMDELLFDGCWLETTDGKSLKQTMGQQVSDSTTMNDNNNNSYLYGYQYAENLSQDHISNEETGRKFPPIPPGFLKIEDLSNQVPFDQSAVMSSAQAEKFLLEESEGGRRYWIAPRTSQGPSSSVKERLVQAIEGLNEEVQDKDFLIQIWLPIQQEGKNFLTTSEQPHFFNPKYSSLKRYRDVSVAYNFLADEDSKESVGLPGRVFLKKLPEWTPDVRFFRSEEYPRIKEAEQCDVRGSLALPVFERGSGTCLGVVEIVTTTQKMNYRPELDNICKALESVNLRSSRSLNPPSREFLQVYNEFYYAALPEVSEFLTLVCRVYDLPLALTWAPCARQGKVGSRHSDENFSECVSTVDDACIVPDHQSRHFLEACSEHHLLQGEGIVGKAFNATKLFFVPEVTTFSKTNYPLAHHAKISGLHAALAVPLKNKFNSSVEFVLEFFFPKACLDTEAQQDMLKSLSATLQQDFRSLNLFIDKELELEVVFPVREEVVFAENPLINAGTGEDMKPLPLEEISQEDSSWISHMIKANEKGKGVSLSWEYQKEEPKEEFMLTSGWDNNQIGSGHNNFLSEAEQFQKVTNSGLRIDMDPSFESASFGVGQTLLGSRRPGEKRRTKTEKTIGLEVLRQYFAGSLKDAAKSIGVCPTTLKRICRQHGITRWPSRKIKKVGHSLKKLQLVIDSVQGVQGSIQLDSFYTSFPELSSPHMSGTGTSFKNPNAQTENGVSAQGTAAAPKSPPSSSCSHSSGSSTCCSTGANQSTNTGTTSNTVTTLMAENASAILKRARSEVRLHTMNQDETKSLSRTLSHKTFSEHPLFENPPRLPENSSRKLKAGGASKVKATFGEAKVRFTLLPTWGFRELQHEIARRFNIDNIAPFDLKYLDDDKEWVLLTCEADLEECIDIYRSSQSRTIKISVHEASQVKLGGSFGSIGLGPSL

SEQ ID NO: 5 - protein, 808 aa, Arabidopsis thaliana
MENNSLPMDPAMDSSFMDGLLLEGCWLETTDASEFLNFSPSTSVAPFDPSSFMWSPTQDTSNSLSQMYGQDCPERSSLEDQNQGRDLSTFNRRWWIGPSGHHGFSVMERLVQAVTHIKDFTSERGSLIQLWVPVDRGGKRVLTTKEQPFSHDPMCQRLAHYREISENYQFSTEQEDSDSSSRDLVGLPGRVFLGKVPEWTPDVRFFKNEEYPRVQHAQDCDVRGTLAIPVFEQGSQICLGVIEVVMTTQMVKLSPDLESICRALQAVDLRSTEIPIPPSLKGPDFSYQAALPEIRNLLRCACETHKLPLAQTWVSCLKQSKTGCRHNDENYIHCVSTIDDACYVGDPTVREFHEACSEHHLLKGQGVVGEAFLTNGPCFSSDVSSYKKSEYPLSHHATMFGLHGTVAIRLRCIHTGSVDFVLEFFLPKNCRDIEEQRKMLNALSTIMAHVPRSLRTVTQKELEEEGDSMVSEVIEKGVTLPKIENTTEVHQSISTPQNVGLVFDGGTTEMGELGSEYGKGVSVNENNTFSSASGFNRVTEKKRTKAEKNITLDVLRQYFAGSLKDAAKSIGVCPTTLKRICRQHGIQRWPSRKIKKVGHSLQKIQRVIDSVEGVSGHHLPIGSFYASFPNLAASPEASSLQQQSKITTFLSYSHSPPAKSPGSSCSHSSSCSSETQVIKEDPTDKTRLVSRSFKETQTTHLSPSSQEDDFLRVKVSYEEEKIRFKMRNSHRLKDLLWEIAKRFSIEDVSRYDLKYLDEDNEWVLLRCDDDVEECVDVCRSFPGQTIKLLLQLSSSYLPERSSVSGCLS

SEQ ID NO: 6 - protein, 955 aa, Arachis duranensis
MRDGGVLSSGTMLEPTPPPPPPPLPPPPAPPPTTTTSISVDYDYINELFVDGCWLAASSSAAAAADGSADFYVPSPSFSNPIFDPFSWPCLDTEQIESQAREREQEHEKQEQPPPFSHDLVVAANSCSRNQQQQYHHYENQSVENNNPNPNNPSEFFRRWWIAPSSNPGPGSYVVEKLLKALMCIKDVNRNKDMLIQIWIPVMNRGGTQILRTNGLPFSLESRSVNLAKYREISEVYQFSAEEDSKELVPGLPGRVYKEKVPEWTPDVRFFRSYEYPRVDHAQVYDVRGSLALPIFEQGSKNCLGVVEVVMTQQKINYRPELESVCQALEAVNLTSSKLPTIQNVKHTSCEKSYETALPEIQEVLRSACEIHKLPLAQTWIPCIKQGKEGCRHSEDNYPHCISPVEHACYVGDPSIQVFHEACSEHHLLKGQGVAGGAFMTNQPCFAPDITLLSKTDYPLSHHARMFGLRAAVAIRLRSIYNSSDDFVLEFFLPLECIDNDEQKKMLTSLSLIIQRVCHSLRVISDKELEEETDFSVEEVIAHEDSGTFASAAAWPEPLQSQIVASLGAQEKSSETMGTSFSDQRQQQQESSVLKGNLDSNGECSTYNVGNLSSKTGDKKKSKVDKTITLQVLRQHFAGSLKDAAKNIGVCTTTLKRICRQHGIKRWPSRKIKKVGHSLQKLQLVIDSVQGASGAFQIDSFYSKFPDLAASPNLSGTSLFSNLKQCDNNPNSLSIQPDPGSLSPEGASKSPSSSCSQSSISSHPCSSMAEQQNHHLTNNNFDSSKDQMVLLVGENSSGDGLLKRIRSEAELKSLNEDRVKIVMPRSQSQETLGQHNVQNGHHGSLSRTKSKGTQKEDAAYRVKVTYGDEKARFKMPKNWGYEDLVQEVGRRFCISDMSKFDVKYLDDDYEWVLLTCDDDLEECIEVCQSSESTTIKLCLQLSNTNHSMRNPLEFR

SEQ ID NO: 7 - skipped

SEQ ID NO: 8 - protein, 914 aa, Arachis duranensis
MRDGGVLSSDGCWLAASSSAAAAADGSADFYVPSPSFSNPIFDPFSWPCLDTEQIESQAREREQEHEKQEQPPPFSHDLVVAANSCSRNQQQQYHHYENQSVENNNPNPNNPSEFFRRWWIAPSSNPGPGSYVVEKLLKALMCIKDVNRNKDMLIQIWIPVMNRGGTQILRTNGLPFSLESRSVNLAKYREISEVYQFSAEEDSKELVPGLPGRVYKEKVPEWTPDVRFFRSYEYPRVDHAQVYDVRGSLALPIFEQGSKNCLGVVEVVMTQQKINYRPELESVCQALEAVNLTSSKLPTIQNVKHTSCEKSYETALPEIQEVLRSACEIHKLPLAQTWIPCIKQGKEGCRHSEDNYPHCISPVEHACYVGDPSIQVFHEACSEHHLLKGQGVAGGAFMTNQPCFAPDITLLSKTDYPLSHHARMFGLRAAVAIRLRSIYNSSDDFVLEFFLPLECIDNDEQKKMLTSLSLIIQRVCHSLRVISDKELEEETDFSVEEVIAHEDSGTFASAAAWPEPLQSQIVASLGAQEKSSETMGTSFSDQRQQQQESSVLKGNLDSNGECSTYNVGNLSSKTGDKKKSKVDKTITLQVLRQHFAGSLKDAAKNIGVCTTTLKRICRQHGIKRWPSRKIKKVGHSLQKLQLVIDSVQGASGAFQIDSFYSKFPDLAASPNLSGTSLFSNLKQCDNNPNSLSIQPDPGSLSPEGASKSPSSSCSQSSISSHPCSSMAEQQNHHLTNNNFDSSKDQMVLLVGENSSGDGLLKRIRSEAELKSLNEDRVKIVMPRSQSQETLGQHNVQNGHHGSLSRTKSKGTQKEDAAYRVKVTYGDEKARFKMPKNWGYEDLVQEVGRRFCISDMSKFDVKYLDDDYEWVLLTCDDDLEECIEVCQSSESTTIKLCLQLSNTNHSMRNPLEFR

SEQ ID NO: 9 - protein, 964 aa, Arachis hypogaea
MRDGGVLSSGTMLEPTPPPPPPPPPPPPPAPPPSEVATTTTSISMDYDYINELFVDGCWLAASSSSAAAAAADGSADFYVPSPSFSNPIFDPFSWPCLDTEQIESQEREREQEHEHEKQQQPPPFSHDLVVAANSCSRNQQQQYHHYENQSVENNNPNPNNPSEFFRRWWIAPSSNPGPGSYVVEKLLKALMCIKDVNRNKDMLIQIWIPVMNRGGTQILRTNGLPFSLESRSVNLAKYREISEVYQFSAEEDSKELVPGLPGRVYKEKVPEWTPDVRFFRSYEYPRVDHAQVYDVRGSLALPIFEQGSKNCLGVVEVVMTQQKINYRPELESVCQALEAVNLTSSKLPTIQNVKHTSCEKSYETALPEIQEVLRSACEIHKLPLAQTWIPCIKQGKEGCRHSEDNYPHCISPVEHACYVGDPSIQVFHEACSEHHLLKGQGVAGGAFMTNQPCFAPDITLLSKTDYPLSHHARMFGLRAAVAIRLRSIYNSSDDFVLEFFLPLECIDNDEQKKMLTSLSLIIQRVCHSLRVISDKELEEETDFSVEEVIAHEDSGTFASAAAWPEPLQSQIVASLGAQEKSSETMGTSFSDQRQQQQESSVLKGNLDSNGECSTYNVGNLSSKTGDKKKSKVDKTITLQVLRQHFAGSLKDAAKNIGVCTTTLKRICRQHGIKRWPSRKIKKVGHSLQKLQLVIDSVQGASGAFQIDSFYSKFPDLAASPNLSGTSLFSNLKQCDNNPNSLSIQPDPGSLSPEGASKSPSSSCSQSSISSHPCSSMAEQQNHHLTNNNFDSSKDQMVLLVGENSSGDGLLKRIRSEAELKSLNEDRVKIVMPRSQSQETLGQHNVQNGHHGSLSRTKSKGTQKEDAAYRVKVTYGDEKARFKMPKNWGYEDLVQEVGRRFCISDMSKFDVKYLDDDYEWVLLTCDDDLEECIEVCQSSESTTIKLCLQLSNTNHSMRNPLEFR

SEQ ID NO: 10 - protein, 918 aa, Arachis hypogaea
MRDGGVLSSDGCWLAASSSSAAAAAADGSADFYVPSPSFSNPIFDPFSWPCLDTEQIESQEREREQEHEHEKQQQPPPFSHDLVVAANSCSRNQQQQYHHYENQSVENNNPNPNNPSEFFRRWWIAPSSNPGPGSYVVEKLLKALMCIKDVNRNKDMLIQIWIPVMNRGGTQILRTNGLPFSLESRSVNLAKYREISEVYQFSAEEDSKELVPGLPGRVYKEKVPEWTPDVRFFRSYEYPRVDHAQVYDVRGSLALPIFEQGSKNCLGVVEVVMTQQKINYRPELESVCQALEAVNLTSSKLPTIQNVKHTSCEKSYETALPEIQEVLRSACEIHKLPLAQTWIPCIKQGKEGCRHSEDNYPHCISPVEHACYVGDPSIQVFHEACSEHHLLKGQGVAGGAFMTNQPCFAPDITLLSKTDYPLSHHARMFGLRAAVAIRLRSIYNSSDDFVLEFFLPLECIDNDEQKKMLTSLSLIIQRVCHSLRVISDKELEEETDFSVEEVIAHEDSGTFASAAAWPEPLQSQIVASLGAQEKSSETMGTSFSDQRQQQQESSVLKGNLDSNGECSTYNVGNLSSKTGDKKKSKVDKTITLQVLRQHFAGSLKDAAKNIGVCTTTLKRICRQHGIKRWPSRKIKKVGHSLQKLQLVIDSVQGASGAFQIDSFYSKFPDLAASPNLSGTSLFSNLKQCDNNPNSLSIQPDPGSLSPEGASKSPSSSCSQSSISSHPCSSMAEQQNHHLTNNNFDSSKDQMVLLVGENSSGDGLLKRIRSEAELKSLNEDRVKIVMPRSQSQETLGQHNVQNGHHGSLSRTKSKGTQKEDAAYRVKVTYGDEKARFKMPKNWGYEDLVQEVGRRFCISDMSKFDVKYLDDDYEWVLLTCDDDLEECIEVCQSSESTTIKLCLQLSNTNHSMRNPLEFR

SEQ ID NO: 11 - protein, 958 aa, Arachis hypogaea
MRDGGVLSSGTMLEPTPPPPPPSPLPPPPPPPSEVATTTTTSILMDFDYINELFVDGCWLAASSSSAAAAADGSADFYVSSPSFSNPIFDPFSWPSLDTEQIESQEREQEHEQQQEQPPFSHDLVVAANNCSQNQQQQYHHYENQSVENNNPNPNNPSEFFRRWWIAPSSNPGPGSYVVEKLLKALMCIKDVNRNKDMLIQIWIPVINRGGTQILRTNGLPFSLESSSVNLAKYREISEVYQFSAEEDSKELVPGLPGRVYKEKVPEWTPDVRFFRSYEYPRVDHAQVYDVRGSLALPIFEQGSKNCLGVVEVVMTQQKINYRPELESVCQALEAVNLTSSKLPTIQNVKRTSCEKSYETALPEIQEVLRSACEIHKLPLAQTWIPCIKQGKEGCRHSEDNYPHCISPVEHACYVGDPSIQVFHEACSEHHLLKGQGVAGGAFMTNQPCFAPDITLLSKTDYPLSHHARMFGLRAAVAIRLRSIYNSSDDFVLEFFLPLECIDNDEQKKMLTSLSLIIQRVCHSLRVISDKEVEEETDFSAEVIAHEDSGTFASAAAWPEPLQSQIVASLGAQEKSSETMGTSFSDQRQQQQESSVLKGNLDSNGECSTYNVGNLSSKTGDKKKSKVDKTITLQVLRQHFAGSLKDAAKNIGVCTTTLKRICRQHGIKRWPSRKIKKVGHSLQKLQLVIDSVQGASGAFQIDSFYSKFPDLAASPNLSGTSLFSNLKQCDNNPNSLSIQPDPGSLSPEGASKSPSSSCSQSSISSHPCSSMAEQQNHHHTNNNFDSSKDQMVLLVGENSSGDGLLKRIRSEAELKSLNEDRAKVVMPRSQSQETLGQHNLKNGHHGSLSRTKSKGTQKEDAPYRVKVTYGDEKARFKMPKNWGYEDLVQEVGRRFCISDMNKFDLKYLDDDYEWVLLTCDDDLEECIEVCQSSESTTIKLCLQFSNTNHSMRNPLEFR

SEQ ID NO: 12 - protein, 912 aa, Arachis hypogaea
MRDGGVLSSDGCWLAASSSSAAAAADGSADFYVSSPSFSNPIFDPFSWPSLDTEQIESQEREQEHEQQQEQPPFSHDLVVAANNCSQNQQQQYHHYENQSVENNNPNPNNPSEFFRRWWIAPSSNPGPGSYVVEKLLKALMCIKDVNRNKDMLIQIWIPVINRGGTQILRTNGLPFSLESSSVNLAKYREISEVYQFSAEEDSKELVPGLPGRVYKEKVPEWTPDVRFFRSYEYPRVDHAQVYDVRGSLALPIFEQGSKNCLGVVEVVMTQQKINYRPELESVCQALEAVNLTSSKLPTIQNVKRTSCEKSYETALPEIQEVLRSACEIHKLPLAQTWIPCIKQGKEGCRHSEDNYPHCISPVEHACYVGDPSIQVFHEACSEHHLLKGQGVAGGAFMTNQPCFAPDITLLSKTDYPLSHHARMFGLRAAVAIRLRSIYNSSDDFVLEFFLPLECIDNDEQKKMLTSLSLIIQRVCHSLRVISDKEVEEETDFSAEVIAHEDSGTFASAAAWPEPLQSQIVASLGAQEKSSETMGTSFSDQRQQQQESSVLKGNLDSNGECSTYNVGNLSSKTGDKKKSKVDKTITLQVLRQHFAGSLKDAAKNIGVCTTTLKRICRQHGIKRWPSRKIKKVGHSLQKLQLVIDSVQGASGAFQIDSFYSKFPDLAASPNLSGTSLFSNLKQCDNNPNSLSIQPDPGSLSPEGASKSPSSSCSQSSISSHPCSSMAEQQNHHHTNNNFDSSKDQMVLLVGENSSGDGLLKRIRSEAELKSLNEDRAKVVMPRSQSQETLGQHNLKNGHHGSLSRTKSKGTQKEDAPYRVKVTYGDEKARFKMPKNWGYEDLVQEVGRRFCISDMNKFDLKYLDDDYEWVLLTCDDDLEECIEVCQSSESTTIKLCLQFSNTNHSMRNPLEFR

SEQ ID NO: 13 - protein, 862 aa, Arachis hypogaea
MEYGGIVHNENGAFGSLSESAVEAEVDLVDELLVEGCWVETTSAGGCYNWMHNPSDAVVAPQPQYLEMLQLQLQEESSSSSSDQESLVGKRWWIGPTRPGPSSSSSSSSSVKERLVVAVGYLKDYTKNNNLLIQIWVPPRRSPLPLPLPLPLDVLTFPNPSPNPNPNLCVRFLRSHEYSHHYQAQQHYDLRGSIALPVFERGTATCLGVLDILITNHLNLTNNYRPQLDNVCNALEAVDFRSSHQNLNANFMPPAIKVYEELYQAALNEIVEVLTSVCKTQNLPLGLTWAPCIQQGKCGCGHSSAMCVSTVDTACYVGDLEMLGFQEACSEYHLFKGQGIVGTAFTSAKPCFAIDITAFSRAEYPLSHLANIFGLHAAVAIPLRSLYTGSADFVLEFFLPKDCHDTEQQKHMLNSLSMLVQQACRSLHVATEDDFTPPMLTHHQAQAQIMEEACSKDQSWIAHMMEAQVQQKGKGVCVSLEYQMEEPKEEFKVTTNWDTANDQAHHQLFSSSDFGHIDVLEHSRSRASTAVDGGEESYALGGRRSSSSGSGGRKSGDKRRTKAEKTISLPVLRQYFAGSLKDAAKSIGVCPTTLKRICRQHGITRWPSRKIKKVGHSLKKLQLVIDSVQGAEGAIQIGSFYASFPELSSTDLSSRSESSPSKKTHSTTIPHQNHNNNTFLKSPPSSACSQTLDVVMTESSEAALLLKRAHSEAAELLQHASLQSQEDTKHNSFISSRSNNKSHHHHSQDRDKERGAFRVKATFGDEKIRFSMQPNWGFRDLQLEMARRFNLNDISISSSNIDLKYLDEDGEWVLLACDADLEECKDIHRSSQSRTIRLSLFQASPLNHLATNTFGNGTTSPS

SEQ ID NO: 14 - protein, 914 aa, Arachis ipaensis
MDFDYINELFVDGCWLAASSSSAAAAADGSADFYVSSPSFSNPIFDPFSWPSLDTEQIESQEREQEHEQQQEQPPFSHDLVVAANNCSQNQQQQYHHYENQSVENNNPNPNNPSEFFRRWWIAPSSNPGPGSYVVEKLLKALMCIKDVNRNKDMLIQIWIPVINRGGTQILRTNGLPFSLESSSVNLAKYREISEVYQFSAEEDSKELVPGLPGRVYKEKVPEWTPDVRFFRSYEYPRVDHAQVYDVRGSLALPIFEQGSKNCLGVVEVVMTQQKINYRPELESVCQALEAVNLTSSKLPTIQNVKRTSCEKSYETALPEIQEVLRSACEIHKLPLAQTWIPCIKQGKEGCRHSEDNYPHCISPVEHACYVGDPSIQVFHEACSEHHLLKGQGVAGGAFMTNQPCFAPDITLLSKTDYPLSHHARMFGLRAAVAIRLRSIYNSSDDFVLEFFLPLECIDNDEQKKMLTSLSLIIQRVCHSLRVISDKEVEEETDFSAEVIAHEDSGTFASAAAWPEPLQSQIVASLGAQEKSSETMGTSFSDQRQQQQESSVLKGNLDSNGECSTYNVGNLSSKTGDKKKSKVDKTITLQVLRQHFAGSLKDAAKNIGVCTTTLKRICRQHGIKRWPSRKIKKVGHSLQKLQLVIDSVQGASGAFQIDSFYSKFPDLAASPNLSGTSLFSNLKQCDNNPNSLSIQPDPGSLSPEGASKSPSSSCSQSSISSHPCSSMAEQQNHHHTNNNFDSSKDQMVLLVGENSSGDGLLKRIRSEAELKSLNEDRAKVVMPRSQSQETLGQHNLKNGHHGSLSRTKSKGTQKEDAPYRVKVTYGDEKARFKMPKNWGYEDLVQEVGRRFCISDMNKFDLKYLDDDYEWVLLTCDDDLEECIEVCQSSESTTIKLCLQFSNTNHSMRNPLEFR

SEQ ID NO: 15 - protein, 865 aa, Arachis ipaensis
MEYGGIVHNENGGFGSLSESAVEAEVDLVDELLVEGCWVETTSAGGCYNWMHNPSDAVVAPQPQYLEMLQLQLQEESSSSSSDQESLVGKRWWIGPTRPGPSSSSSSSSSSSVKERLVVAVGYLKDYTKNNNLLIQIWVPPRRSPLPLPLPLPLDVLAFPNPSPNPNPNLCVRFLRSHEYSHHYQAQQHYDLRGSIALPVFERGTATCLGVLDILITNHLNLTNNYRPQLDNVCNALEAVDFRSSHQNLNANFIPPAIKVYEELYQAALNEIVEVLTSVCKTQNLPLGLTWAPCIQQGKCGCGHSSAMCVSTVDTACYVGDLEMLGFQEACSEYHLFKGQGIVGTAFTSAKPCFAIDITAFSRAEYPLSHLANIFGLHAAVAIPLRSLYTGSADFVLEFFLPKDCHDTEQQKHMLNSLSMLVQQACRSLHVATDDDFTPPMLTHHQAQAQIMEEACSKDQSWIAHMMEAQVQQKGKGVCVSLEYQMEEPKEEFKVTTNWDTTNDQAHHQLFSSSDFGHIDVLEHSRSRASTAVDGGEESYALGGRRSSSSGSGGRKSGDKRRTKAEKTISLPVLRQYFAGSLKDAAKSIGVCPTTLKRICRQHGITRWPSRKIKKVGHSLKKLQLVIDSVQGAEGAIQIGSFYASFPELSSTDLSSRSESSPSKKTHTTNIPHHQNPNNNTFLKSPPSSACSQTLDVVMTESSEAALLLNRAHSEAAELLQHASLQSQEDTKHNSFISSRSNNKSHHHHSQDRDKERGAFRVKATFGDEKIRFSLQPNWGFRDLQLEMARRFNLNDISISSSNIDLKYLDEDGEWVLLACDADLEECKDIHRSSQSRTIRLSLFQASPLNHLATNTFGNGTTSPS

SEQ ID NO: 16 - protein, 582 aa, Cajanus cajan
MQIWVPERGGGGGGGGVGPGPDESVWGGYPMNMNMNMNMNMNMNMNMNMNMNMNMMNRSIRVGFLRWEEGVPYGYEEGPGWMGLPVLERGSGKCLGVLHIEYEYEGGVEGAVNEVVEVLTCVCKAQNLPLALTWAPCTQAKCGYGHSHSNYVSTVDRACFVGDAHLLPFHEVCSDHHLLRGQGIVGTAFTTAKPCFATDITAFTNDEYPLAHHASVLGLHAAVAIPLRSVSTDFVVELFLPKDCLLREHQNHLLNSLSLLLQQACRSLHVVTEDELSFPFPQVVEEQSWIANMMEAQAQKGKGVCVSLEYLELEEPMEEFKVTSNCNWDKTPSYVEEQQVFSDFIAQDSQTHTHTFSARRGRKSGEKRRTKAEKTISLPVLRQYFAGSLKDAAKSIGVCPTTLKRICRQHGITRWPSRKIKKVGHSLKKLQLVIDSVQGAEGSIQIGSFYSSFPELSSAAPCESKNKNINNSLHGHAESPVGVAVALRVKATFADEKIRFSLQQVWGFAELQVEIARRFNLNEMRSVVLKYLDDEGEWVVLACDADLEECKDLHTASHNRTIRLALFQASPPNTFPYPSPST

SEQ ID NO: 17 - protein, 691 aa, Cajanus cajan
MEYEGLVQNGAYGSLSEFFAPETDLIDELFVEGCWVETRVNSKSEWSMEAQIEESEVGKRWWIGPRANPGPSTSVQERLVVAVGYLKEYAMNSIQVWVPARTTRAQPPYALGLDYGDATRGFEFEDEWSPNPNIRFFRSDEQYDVRAGSLALPVFERGTAICLGFLQILMPNNPNLHNVCHALQGVDFINQNLNVPPGVTVKGFDELYEGALNEIVQVLTCVCKAHKLPLGLTWAPCIQQGKSGCGHLKELLGFQEACSQCHLLGQGQGQGVVGTAFTTTKPCFANDMSKALPLAHHANMFGLHAAVAIPLRSVSADFVLEFFLPRDCQDYKHILNSLSMLVQQACRSLHVVTVEEEFLLPVAHEMESSSWIAHMMEAQTQQNGKGVSVSLEYLQEPKQEFKVTTNGNCNENEESYGGRRGGRKSGDKRRTKAEKTISLPLLRQYFAGSLKDAAKSIGVCPTTLKRICRQHGITRWPSRKIKKVGHTLRKLQVVIDSVQGAQGAIQIGSFYTSFPELSSTTATASAVSQSSKNVNNNNDTSENNQGQLGATTFKSPTSSCNASIQLQAPHPIQCLEVPPLPQTSVWNTTTFRVKATFGDEKIRFSLQPNWVFRDLQMEIARRFNLNENINNIQLKYLDDAREWVLLTCDADLEECKDINRSSHNRTIRLFLFQASPLNHANAFGSGSPSYS

SEQ ID NO: 18 - protein, 862 aa, Cajanus cajan
MMEAPPPDGTTSMDFEYMGELFLDGCWLEASADGSEFLLQSPSFSNSLFDPSFSWPALETNHNESHDAAFGTQQESHNSMVNIVSGGGGGSGMQFQFDAHSVEGASEGVKRWWFAPTPSPGPGPSITEKLLRALTWFKDYNRNKDMLIQIWVPVHRGGRPILAANDLLFSLESRSVNLAKYREISVGYEFSTDEGESKELVPGLPGRVFRNKVPEWTPDVRFFKSDEYPRVDHAQEYDVSGTLAVPIFEQGSKMCLGVIEVVMTTQQINYGPELESVCKALEAVDLRSSKHSNIQIVKACNRSYDAALPEIQEVLRSACEMHNLPLAQTWIPCVQQGKEGCRHSDDNYLLCISPVEQACYVRDPSIRPFHEACTEHHLLKGEGVAGGAFMTNQPCFSTDITSLSKKDYPLSHHARLLGLRAAVAIRLRSIYNSTDDFVLEFFLPVDCNDSEEQRKMLTSLSIIIQRVCCSLRVISDKELEEANLSVDEVIGLADSGVSRTAICSGLQQKEKSSETMCRKFSDLRQQENPILKGNLDCVRECSTSVEGNFSGAGISRTVERRRAKAEKTITLQVLRQYFAGSLKDAAKNIGVCTTTLKRICRQHGIKRWPSRKIKKVGHSLQKLQLVIDSVQGASGAFQIDSFYSNFPDLASPNLSGTSLFSTLNQADNPNSVSTQPEPGALSPEGASKSPSSSCSQKLQHHTNNKDPAVGEDSADVVLKRIRSEAELKSLSRDGTKLLPRSQSQETLGEHPITQYHRPLLKTSSKVDAHRVKVTYGDEKTRFRMLKSWGYEDLLQEIARRFNVSDMRKFDVKYLDDDCEWVLLTCDADLEECIDVCQSSESSTIKLCLHASSHSMRSSLEFR

SEQ ID NO: 19 - protein, 886 aa, Cajanus cajan
MMGDGGVTSSGTMMEAPPPDGTTSMDFEYMGELFLDGCWLEASADGSEFLLQSPSFSNSLFDPSFSWPALETNHNESHDAAFGTQQESHNSMVNIVSGGGGGSGMQFQFDAHSVEGASEGVKRWWFAPTPSPGPGPSITEKLLRALTWFKDYNRNKDMLIQIWVPVHRGGRPILAANDLLFSLESRSVNLAKYREISVGYEFSTDEGESKELVPGLPGRVFRNKVPEWTPDVRFFKSDEYPRVDHAQEYDVSGTLAVPIFEQGSKMCLGVIEVVMTTQQINYGPELESVCKALEAVDLRSSKHSNIQIVKACNRSYDAALPEIQEVLRSACEMHNLPLAQTWIPCVQQGKEGCRHSDDNYLLCISPVEQACYVRDPSIRPFHEACTEHHLLKGEGVAGGAFMTNQPCFSTDITSLSKKDYPLSHHARLLGLRAAVAIRLRSIYNSTDDFVLEFFLPVDCNDSEEQRKMLTSLSIIIQRVCCSLRVISDKELEEANLSVDEVIGLADSGVSRTAICSGLQQKEKSSETMCRKFSDLRQQENPILKGNLDCVRECSTSVEGNFSGAGISRTVERRRAKAEKTITLQVLRQYFAGSLKDAAKNIGVCTTTLKRICRQHGIKRWPSRKIKKVGHSLQKLQLVIDSVQGASGAFQIDSFYSNFPDLASPNLSGTSLFSTLNQADNPNSVSTQPEPGALSPEGASKSPSSSCSQSSISSHSCSSMSELQHHTNNKDPAVGEDSADVVLKRIRSEAELKSLSRDGTKLLPRSQSQETLGEHPITQYHRPLLKTSSKVDAHRVKVTYGDEKTRFRMLKSWGYEDLLQEIARRFNVSDMRKFDVKYLDDDCEWVLLTCDADLEECIDVCQSSESSTIKLCLHASSHSMRSSLEFR

SEQ ID NO: 20 - protein, 664 aa, Cajanus cajan
MEAQIEESEVGKRWWIGPRANPGPSTSVQERLVVAVGYLKEYAMNSIQVWVPARTTRAQPPYALGLDYGDATRGFEFEDEWSPNPNIRFFRSDEQYDVRAGSLALPVFERGTAICLGFLQILMPNNPNLHNVCHALQGVDFINQNLNVPPGVTVKGFDELYEGALNEIVQVLTCVCKAHKLPLGLTWAPCIQQGKSGCGHLKGEHYENYVSLVDGASFVADVELLGFQEACSQCHLLGQGQGQGVVGTAFTTTKPCFANDMSKALPLAHHANMFGLHAAVAIPLRSVSADFVLEFFLPRDCQDYKHILNSLSMLVQQACRSLHVVTVEEEFLLPVAHEMESSSWIAHMMEAQTQQNGKGVSVSLEYLQEPKQEFKVTTNGNCNENEESYGGRRGGRKSGDKRRTKAEKTISLPLLRQYFAGSLKDAAKSIGVCPTTLKRICRQHGITRWPSRKIKKVGHTLRKLQVVIDSVQGAQGAIQIGSFYTSFPELSSTTATASAVSQSSKNVNNNNDTSENNQGQLGATTFKSPTSSCNASIQLQAPHPIQCLEVPPLPQTSVWNTTTFRVKATFGDEKIRFSLQPNWVFRDLQMEIARRFNLNENINNIQLKYLDDAREWVLLTCDADLEECKDINRSSHNRTIRLFLFQASPLNHANAFGSGSPSYS

SEQ ID NO: 21 - protein, 646 aa, Cajanus cajan
MGYDAYAFGEVGEEDMIEELLVEGCWVERSGKRWWINPNPGSVKERVVVAVGYLREYRKNGNEVMQIWVPERGGGGGGGGVGPGPDESVWGGYPMNMNMNMNMNMNMNMNMNMNMNMNMMNRSIRVGFLRWEEGVPYGYEEGPGWMGLPVLERGSGKCLGVLHIEYEYEGGVEGAVNEVVEVLTCVCKAQNLPLALTWAPCTQAKCGYGHSHSNYVSTVDRACFVGDAHLLPFHEVCSDHHLLRGQGIVGTAFTTAKPCFATDITAFTNDEYPLAHHASVLGLHAAVAIPLRSVSTDFVVELFLPKDCLLREHQNHLLNSLSLLLQQACRSLHVVTEDELSFPFPQVVEEQSWIANMMEAQAQKGKGVCVSLEYLELEEPMEEFKVTSNCNWDKTPSYVEEQQVFSDFIAQDSQTHTHTFSARRGRKSGEKRRTKAEKTISLPVLRQYFAGSLKDAAKSIGVCPTTLKRICRQHGITRWPSRKIKKVGHSLKKLQLVIDSVQGAEGSIQIGSFYSSFPELSSAAPCESKNKNINNSLHGHAESPVGVAVALRVKATFADEKIRFSLQQVWGFAELQVEIARRFNLNEMRSVVLKYLDDEGEWVVLACDADLEECKDLHTASHNRTIRLALFQASPPNTFPYPSPST

SEQ ID NO: 22 - protein, 646 aa, Cannabis sativa
MPNFSPPNVCDELYQLVLNEIVEVLVSVCEIHRIPLAQTWASCHQQGHSGENYARCISSASLVSDLELLGFHQACSQQHHLFRNQGIVGAAFTGNKPCFTTDITALDKKEYLLSHHARMFGLRAALAIPLRSIYSGISSFGFVLELFLPKDCQDQEEQKQMSNSLSFLIQQACECNSLRVVVEKELKEDQVMLQTRDQTTVSTPEEGLKLWSANTTTYPVGDQSSGKRSSCFDHVVVEAQQHGREVSASLDSLTEEPGKEFRVTPHGFNLNHGDLPKGKVPIDFGQLQQCSVSKESSNESADSYYFCGHSSSGTRKVGEKRTKSTENISLSVLRQYFAGSLKDAAKCIGVCPTTLKRICRQHGITRWPSRKIKKVGHSLMKLQLMINSVEGADRAIQIGSFYSSIPQLNSPMIPENNDDSSSSINPSEHRNHQQLNSQSNSQLESGIYKYNHGLAMKPLSSMSSEVSALQLHSTTTFDGFNGDSLITEDSSLVLNRSCSGHGELLASSRTENQILHQTLPLLPEKNVGITSRDKFAFRVKANYGDKKIRFSLIPNCSYKELQLEIMRRFSLDDITMIDIKYLDDDRDWILLTCNADLQECFEIHSQSQNWKMRLCLQQASSNQKIEPSPFESSSSSHVSSTNYKSV

SEQ ID NO: 23 - protein, 924 aa, Cannabis sativa
MEVGGFCKSYTMEEGVLSPSTILGAPSEYPMDLDFMDELFLEGCWLETRDGSEYISQTSSSNPLFDPLFWPTLETNGDLNANPSQRSNQEGRQKSIFNESVGVSVLRALPPSQTINNAPNNPGVSEGLITENDEMRRKNWIGTKESQGPSSFVMEKLCRALMYIKDVIRDKDILVQIWIPVDKEGRRVLTTRDLPFALDDSCPKLARYRDISVKYQFPAEEDSKGLIMGLPGRVFSGKVPEWTPDVRYFRNDEYPRLMHAYQYDVRGTLALPIFEQGSRICLGVVEVIMTTQKIKYRPELESVCKALEAVNLKSSEVLSTHNVFNKYYQAALPEIQQVLKSACDTHRLPLAQTWVPCIYQAKEGCRHSDENYVQCVSTVDHACYVADPHIQGFHEACSEHHLLRGQGVVGGAFMTNQPCFSADITLYPKTEYPLSHHAMLFELHAAVAIRLRSIHTGAADFVLEFFLPKDCTDPEEQKKMLTSLSLIIQQCCQSLRVVTEKELEEEGDFQANKVLTPSIDRPDTEICFQEVQQNETDLSLFTVEKTSDGRHSKSSQNQRGSSLKPSDEYVEECSTVGEGSFSNLGGVKTGERRRTKAEKTITLQVLRQYFAGSLKDAAKSIGVCSTTLKRICRQHGIKRWPSRKIKKVGHSLQKLQLVIDSVQGASGAFQIDSFYSNFPELASPNVSGTSPFSTSKANDHPTPSCLQQPGEGSGGMYSAQATTAAAAATSKSSSTYSQSSSSSQCCSSRSQQHPQTWNNMVTSSEDANGGENSGDDVVLKRVRSEAELFASHEVDNNNLLPRSQSHISLMEHRKSLKSGFPPSSVKNERRLTQQEGELQRVKVTYGEEKTRFRIHNNWGFTDLQQEVGRRFGIQDMTTFTIKYLDDDSEWVLLTCDADLEECFEVWPASQNSTIKLSLQLSRVS

SEQ ID NO: 24 - protein, 936 aa, Casuarina glauca
MEIERKLNMDYGAFASNSTTYGNLTDTAMEMDFMDELLFEGCWLETTSGSNHLPSGPLTSRALNDPSHYLPLLDSNSSGHLNISHHQQIFQEETEGTFPESEGILVEGTELGRRLWIAPRANPSPSTSVKERLMLAIGYLRECTKNMNVLIQIWVPIRRGGSYFLTTQDQPYYFGANCKNLANYRNVSKAYQFAVEEDMEESAGLPGRVFLGKLPEWTPDVRFFKKDEYPRINYAQQYDVRGSLALPVFERGSGTCLGVVEIVTNTQKINYRPELENVCQALESVDLRSSQLLSPPGVKACDELYQAALAEIIEVLATVCKAHRLPLALTWAPCYQQGKGGCRHSDENYALCVSTVDAACFVADLDVLGFHEACSEYHLFRGQGTVGTAFTTSKPCFATDITAFSKTEYPLSHHARMFGLRAAVAIPLRSIYTGSSEFVLEFFLPKDCQDPEEQRQMLNSLSIVLQQACRSLHAVMDKEPEEQEVIYPVKEIAIASDVRINKEEPQKSGSPPMREASTKESSWIAHMMEAQQKGKGVSISLEYQEEEPKEEFKVTTHWDNTLGGSCHGQAFSDFGQLQQSSGSKGSVEGGGDSYSYGSRRSSGGRRAGEKRRTKTEKTISLPVLRQYFAGSLKDAAKSIGVCPTTLKRICRQHGITRWPSRKIKKVGHSLRKLQLVIDSVQGAEGAIQIGSFYSNFPELSSSGNSSFSSLKMNENSKQSNAIPETSGLFIQGSSTLSKSPPSSCSQNSGPSIFCPSGAKQQNTTVNTLSTGETLMRENPVGVLQMMGCTEVNLHAMSQQDLSLLQGVESFKSFGSHPGLETLPILPESSSHNSQYGGALRVKATFGDEKIRFSWQQNWTFGDLQLEIARRFNLDDINRVDLKFMDDDGEWVLLTCDADFQECIDIHRASESHTVRLCVQHASNPCLGSPFGNTSLS

SEQ ID NO: 25 - protein, 967 aa, Cicer arietinum
MEYGGGLVEDCGGFGTMVGGETDMIEELLVEGCWVEASENNLMMMHHDDHMSSSTTPQPHYIPMGDNDEESGNFVVGKRWWIGPQANPGPSTSVKERLVLAVGYLKEYTKNSNSNSTSNSNSNSNSNSNVLIQIWVPLRRRSGLFHNQYHNPNPVHESLPISVPNSNVQVRFFRSHEYPRVQAHHGSLLALPVFERGTATCLGVIEFLIANQNLINYRPQLDHLSNALEAVDFTSNQNMIPPAVKVFEELYEAAVNEIVQVLASVCKTHNLPLALTWAPCIQQEGGGRGKGGCSNSNGNSNSNSNGSNNNMMMSCVSTVDSACYIGDVDVLGFQEACSEYHLYNGQGIVGTAFTTTKPCFAIDITAFSKAEYPLAHHANMFGLHAAVAIPLRSVYTGSAADFVLEFFLPKDCLDTHQQKHMLNSLSLVVQQACRSLHLHVVMEDDHHNHNHHHLHHQHQHQHQHEEDQFTFPTTNIYMPSVDAAAAAPVVVLSQVEADASASASACSTKETTSSSCSWIAHMMEAQHKGKGVSVSLEYLQEPKEEFKVTTCNWEREREGNSVFSEFGQVLQQQQHEHQSMSNSRASTVVSVEGGEESGGGGGSGGGGRRSSCSSNGRKSGDKRRTKAEKTISLPVLRQYFAGSLKDAAKSIGVCPTTLKRICRQHGITRWPSRKIKKVGHSLKKLQLVIDSVQGAEGAIQIGSFYASFPELSSATGHSDQSSMKLMHNHGVSDHHNSFYGDGGVTTSNLKSPSSACSQTVGNQTNSTLINNNVVLMTESNALASTDHAHAHAHAAALMQIRRTHSEAELLHHHTSNIDIQDYQLHDQDTKQLLLHFNKSQTLPPRPSTTTTTNGYNNSLERGAFRVKATFADEKIRFSLQGMWCFRDLQVEIARRFNLNDMNNLVVKYLDDEGEWVVLACDGDLEECKDLHTSSHTRTIRLSLFQASPLNLHPNTFRNTSSSPPSSS

SEQ ID NO: 26 - protein, 904 aa, Cicer arietinum
MEDGALTSSTTMMEAPQPDENSMDFDYVSELLLDGCWLEASADGSDFLLQSSPFSNPLFDPSFTWPSLDNIDPPDNVDRHKSQDASLGTEQESRSIVNVDGGSNQKEYRFETYSGEGFFSRWWIGPTPNSGPGGSFIVEKLIRALKWIKDFDRNKDMLIQIWVPVNRGDDRPFLTANDLPFSLETRSLNLARYREISVRYQFSAEEEDSKDLVAGLPGRVYRDKVPEWTPDVRFFRSDEYPRVDHAQECDIHGTLAVPVFEQGSRTCLGVIEVVMTTQQSNYSAELETVCKALEVVDLRSSRHSSLQNVKARDRSYETALPEIQEVLRSACEMHKLPLAQTWIPCIQQGKDGCRHSDDNYVHCISPVEYACYIGDSSVRFFHEACMEHHLLKGQGVAGGAFMTNQPCFSADITSLSKIDYPLSHHARLFGLRAAVAIRLRSIYSTSDDYVLEFFLPVDCNDSGEQKKMLTSLSMIIQRVCRNLRVITNKELEKNNLSANEVMDLADSGFASGATWSELQHRRMAASLDGDFFFNETMGGKFSEQTQQQENLILKGDTESGRECSLSVEGNLLSSVGIREKRRPKADKTITLQVLRQYFAGSLKDAAKNIGVCTTTLKRICRQHGIKRWPSRKIKKVGHSLQKLQLVIDSVQGASSTFQIDSFYSKLSDLASPNLSGTSLISTLNQIDNQVSLNTQPDPDSLSPEDASKSPSTSCSQSSFSSHSCSSMSEQQHHTNNFASNKDPLVGEDSVDVVLKRIRSEAELKSLIQDNNKANVMPRSQSHETLGEHPITEYHQSLLKTDRKASQKEDAHRVKVTYGDEKSRFRMPKTWCYEDVVQEIGRRFNVSDMSKFDIKYLDDDCEWVLLTCDADLEECIDVCQSSEISTIKLCLQPSSNFIRSSLEFR

SEQ ID NO: 27 - protein, 945 aa, Citrus clementina
MDDGNFTPNPSFGDFPGTAMDLDFMDELLFDGCWLETTDALDFLQPGPSSSGPADDTSQYLPYSEGTTGHLSMNVNPQQQVYQEETKNKFTENPSLVYPKIEEIQDTRTQDHQGFDPATSSGQSGSFLAQGNELGRRWWIGPRENTGHSSSVKDRLMQAIIYLKDYIKDGKALVQIWVPINSGGKQLLTTDDQPYSLDPNSKSLESYRNVSTTYHFAADEDSKEFVGLPGRVFREQSPEWTPDVLFFRSEEYPRVNHAQQYDVHGSLALPVFERGSGACLGVVEVVTTSRKINYRLDLENVCKALEAVDLRSSGNFSTSCVKARNELYHAAMPEIAEVLRSVCKTHKLPLALTWAPCVQGRKVECQQSDENFPHCFLTVDSACFVANENLSGFFVACSEQQLLQGQGIVGKAFSLSKQCFTADITAFSKSNYPLSHLARMFGLRAAVAIPLRSITTGVVEFILEFFLPRECQDIEEQKQMVKSLSVAMQQVCQSLRLAMEKELEVVILPVGEMAVTSDGSSPSKETSQEQSSWISHMIEAQQKGKGVSVSWDHQEEPKEEFKMTTHWDDARAESFHKEVFPGFGQFQHNSGAKSSVEGGGDSSSLGGHLSVGSRKAGEKRRTKTEKTISLQVLRQYFAGSLKDAAKSIGVCPTTLKRICRQHGITRWPSRKIKKVGHSLRKLQLVIDSVQGAEGAIQIGSFYTTFPDLNSPNFSGSGTFSSMKINDHPEPSNAPPANGLFSTGAAVSKSPSSSCSQSSGSSNCCSTGAKLNTTNINALSSVDTKMVEDPGGMLKRARSDAELHALNQEEPKLLARSRSHKILGEHVSLESLPPLPKCGNHNLRDGSTFRVKASFGEEKIRFSLQPNWGFKDLQQEIARRFNIEDFNEIDLKYLDDDHEWVLLTCDADLEECIDIYKSSQSHTIKISLHRASHLKLVKVAHNNAPS

SEQ ID NO: 28 - protein, 936 aa, Citrus clementina
MEDTVFLPGTMRGASLDSAMDLDYMNELLAEGCWLETIDGSEFPHPSPSTSTALFDSSFVWPASEITNGDTGRNPSQQGKQDDMQQSFFLQTSSMNDPQQNGPLSTPSLSQGMVNVDEDDGQLDDNIAEGSELSKRRWIGPRANLGPATSVIQRLGWAVGYIKDFSINKDVLIQLWVPVIRAGRQVLTTYDQPFSLDLKCQRLANYRAISIKYYFSAEEDSKDVAGLPGRVFLGKAPEWTPDVQFFRSDEYPRVDHAQQYDVRGTLAVPVFEQGSRTCLGVIEVVMMTQKLKYRSELESVCKALEAVDLRSSEVPSTKNMKAWNTSYQAALPEIREVLRCACETHRLPLAQTWVSCIQQGKVGCWHSDKNNNHCVSTVDDACYIADPDMWGFQEACSEHHLLKGQRVAGEAFLTNQPCFSNDITSLKKTEYPLSHHARMFGLCGAVAIRLRSILTGNSDFVLEFFLPKGCRDPEEQKKMLSSLSIVIQQVSRSLRVVTDKEMEEETSLPVSEVIFPSDGRPSREKILKVDSHSEKYSHDNSFQSACLTKVQRDCDVSLNQNGKPRKVSGKRFLEGGHRKEDFSLKGSAEYCDDSNSVEGSFSSVALGKTGEKRRTKVDKTITLQVLQQYFSGSLKDAAKSIGVCPTTLKRICRQHGIKRWPSRKIKKVGHSLQKLQLVIDSVQGASGSFQIGSFYTNFPELASPNLSRSGASPFSNSLPTDQQKLTGMQAKGGTLSPQAQAAKSPSSSCSQSSNSSQCCTSGTQQHRSTNNIAGSEDPVVGESFDDVVLKRVRSYEELHASSQEPRLLPRSQSYKSFREQPIPRLPENGCRMSQEVVDGRRVKVTYGEEKIRLRMQDNWKFQDLLQEIARRFNIDDMSLFDVKYLDDDSDWVLLTCDADLEECIEVCRSSEGQTIKLLLQVSHHLFERRSGSSGNS

SEQ ID NO: 29 - protein, 721 aa, Citrus sinensis
MDDGNFTPNPSFGAFPGTAMDLDFMDELLFDGCWLETTDALDFLQPGPSSSGPADDTSQYLPYSEGTTGHLSMNLNPQQQVYQEETKNKFTENPSLVYPKIEEIQDTRTQDHQGFDPATSSGQSGSFLAQGNELGRRWWIGPRENTGHSSSVKDRLMQAIIYLKDYIKDGKALVQIWVPINSGGKQLLTTDDQPYSLDPNSKSLESYRNVSTTYHFAADEDSKEFVGLPGRVFREQSPEWTPDVLFFRSEEYPRVNHAQQYDVHGSLALPVFERGSGACLGVVEVVTTSRKINYRLDLENVCKALEAVDLRSSGNFSTSCVKARNELYHAAMPEIAEVLRSVCKTHKLPLALTWAPCVQGRKVECQQSDENFPHCFLTVDSACFVANENLSGFFVACSEQQLLQGQGIVGKAFSLSKQCFTADITAFSKSNYPLSHLARMFGLRAAVAIPLRSITTGVVEFILEFFLPRECQDIEEQKQMVKSLSVAMQQVCQSLRLAMEKELEVVILPVGEMAVTSDGSSPSKETSQEQSSWISHMIEAQQKGKGVSVSWDHQEEPKEEFKMTTHWDDARAESFHKEVFPGFGQFQHNSGAKSSVEGGGDSSSLGGHLSVGSRKAGEKRRTKTEKTISLQVLRQYFAGSLKDAAKSIGVCPTTLKRICRQHGITRWPSRKIKKVGHSLRKLQLVIDSVQGAEGAIQIGSFYTTFPDLNSPIFLGVVLFHQ

SEQ ID NO: 30 - protein, 936 aa, Citrus sinensis
MEDTVFLPGTMRGASLDSAMDLDYMNELLAEGCWLETIDGSEFPHPSPSTSTALFDSSFVWPASEITNGDTGRNPSQQGKQDDMQQSFFLQTSSMNDPQQNGPLSTPSLSQGMVNVDEDDGQLDDNIAEGSELSKRRWIGPRANLGPATSVIQRLGWAVGYIKDFSINKDVLIQLWVPVIRAGRQVLTTYDQPFSLDLKCQRLANYRAISIKYYFSAEEDSKDVAGLPGRVFLGKAPEWTPDVQFFRSDEYPRVDHAQQYDVRGTLAVPVFEQGSRTCLGVIEVVMMTQKLKYRSELESVCKALEAVDLRSSEVPSTKNMKAWNTSYQAALPEIREVLRCACETHRLPLAQTWVSCIQQGKVGCWHSDKNNNHCVSTVDDACYIADPDMWGFQEACSEHHLLKGQRVAGEAFLTNQPCFSNDITSLKKTEYPLSHHARMFGLCGAVAIRLRSILTGNSDFVLEFFLPKGCRDPEEQKKMLSSLSIVIQQVSRSLRVVTDKEMEEETSLPVSEVIFPSDGRPSREKILKVDSHSEKYSHDNSFQSACLTKVQRDCDVSLNQNGKPRKVSGKRFLEGGHRKEDFSLKGSAEYCDDSNSVEGSFSSVALGKTGEKRRTKVDKTITLQVLQQYFSGSLKDAAKSIGVCPTTLKRICRQHGIKRWPSRKIKKVGHSLQKLQLVIDSVQGASGSFQIGSFYTNFPELASPNLSRSGASPFSNSLPTDQQKLTGMQAKGGTLSPQAQAAKSPSSSCSQSSNSSQCCTSGTQQHRSTNNIAGSEDPVVGESFDDVVLKRVRSYEELHASSQEPRLLPRSQSYKSFREQPIPRLPENGCRMSQEVVDGRRVKVTYGEETIRLRMQDNWKFQDLLQEIARRFNIDDMSLFDVKYLDDDSDWVLLTCDADLEECIEVCRSSEGQTIKLLLQVSHHLFERRSGSSGNS

SEQ ID NO: 31 - protein, 945 aa, Citrus sinensis
MDDGNFTPNPSFGAFPGTAMDLDFMDELLFDGCWLETTDALDFLQPGPSSSGPADDTSRYLPYSEGTTGHLSMNLNPQQQVYQEETKNKFTENPSLVYPKIEEIQDTRTQDHQGFDPATSSGQSGSFLAQGNELGRRWWIGPRENTGHSSSVKDRLMQAIIYLKDYIKDGKALVQIWVPINSGGKQLLTTDDQPYSLDPNSKSLESYRNVSTTYHFAADEDSKEFVGLPGRVFREQSPEWTPDVLFFRSEEYPRVNHAQQYDVHGSLALPVFERGSGACLGVVEVVTTSRKINYRLDLENVCKALEAVDLRSSGNFSTSCVKARNELYHAAMPEIAEVLRSVCKTHKLPLALTWAPCVQGRKVECQQSDENFPHCFLTVDSACFVANENLSGFFVACSEQQLLQGQGIVGKAFSLSKQCFTADITAFSKSNYPLSHLARMFGLRAAVAIPLRSITTGVVEFILEFFLPRECQDIEEQKQMVKSLSVAMQQVCQSLRLAMEKELEVVILPVGEMAVTSDGSSPSKETSQEQSSWISHMIEAQQKGKGVSVSWDHQEEPKEEFKMTTHWDDARAESFHKEVFPGFGQFQHNSGAKSSVEGGGDSSSLGGHLSVGSRKAGEKRRTKTEKTISLQVLRQYFAGSLKDAAKSIGVCPTTLKRICRQHGITRWPSRKIKKVGHSLRKLQLVIDSVQGAEGAIQIGSFYTTFPDLNSPIFSGSGTFSSMKINDHPEPSNAPPANGLFSTGAAVSKSPSSSCSQSSGSSNCCSTGAKLNTTNINALSSVDTKMVEDPGGMLKRARSDAELHALNQEEPKLLARSRSHKILGEHVSLESLPPLPKCGNHNLRDGSTFRVKASFGEEKIRFSLQPNWGFKDLQQEIARRFNIEDFNEIDLKYLDDDHEWVLLTCDADLEECIDIYKSSQSHTIKISLHRASHLKLVKVAHNNAPS

SEQ ID NO: 32 - protein, 945 aa, Citrus trifoliata
MDDGNFTPNPSFGALPGTAMDLDFMDELLFDGCWLETTDALDFLQSGPSSSGPADDTSRYLPYSEGTTGHLSMNLNPQQQVYQEETKNKFTENPSLVYPKIEEIQDTRTQDRQGFDPATSSGQSGGFLAQGNELGRSWWIGPTENTGHSSSVKDRLMQAIIYLKDYIKDGKALVQIWVPINSGGKQLLTTDDQPYSLDPNSKSLESYRNVSTTYHFAADEDSKEFVGLPGRVFREQSPEWTPDVLFFRSEEYPRVNHAQQYDVHGSLALPVFERGSGACLGVVEVVTTSRKMNYRLDLENVCKALEAVDLRSSENFSTSCVKARNELYHAAMPEIAEVLRSVCKTHKLPLALTWAPCVQGRKVECQQSDENFPHCFLTVDSACFVANENLLGFFVACSEQQLLQGQGIVGKAFSLSKQCFTADITAFSKSNYPLSHLARMFGLRAAVAIPLRSITTGVVEFILEFFLPRECQDIEEQKQMVKSLSVAMQQVCQSLRLAMEKELEVVVLPVGEMAVTSDGSSPSKETLQEQSSWISHMIEAQQKGKGVSVSWDHQEEPKEEFKMTTDWDDARAESFHKQVFPGFGQFQHNSGAKSSVEGGGDSSSLAGHLSVGSRKAGEKRRTKTEKTISLQVLRQYFAGSLKDAAKSIGVCPTTLKRICRQHGITRWPSRKIKKVGHSLRKLQLVIDSVQGAEGAIQIGSFYTTFPDLNSPNFSGSGTFSSMKINDPPEPSNAPPANGLFSTGAAVSKSPSSSCSQSSGSSNCCSTGAKLNTTSINALSSVDTKMVEDPGGMLKRARSDAELHALNQEEPKLLARSLSHKILGEHVSLESLPPLPKYGNHNLRDGSTFRVKATFGEEKIRFSLQTNWGFKDLQQEIARRFNIEDFNKIDLKYLDDDNEWVLLTCDADLEECIDIYKSSQSHTIKISLHRASHLKLVKVAHNNAPS

SEQ ID NO: 33 - protein, 934 aa, Citrus trifoliata
MEDTVFLPSTMHGASLDSAMDLDYMNELLAEGCWLETIDGSEFPHPSPSTSTALFDSSFLWPASEITNGDTSRNPSQQGNQDDMQQSFFLQTSSMNDPQQKGPLSTPSLSQGMVNVDEDDGQLDDNITEGSELSKRRWIGPRANPGPATSVIQRLGWALGYIKDFSINKDVLIQLWVPVIRAGRQVLTTYDQPFSLDLKCQRLANYRDISIKYYFSAEEDSKDVAGLPGRVFLGKAPEWTPDVQFFRSDEYPRVDHAQQYDVRGTLAVPVFEQGSRTCLGVIEVVMTTQKLKYRSELESVCKALEAVDLRSSEVPSTKNMKAWNTSYQAALPEIREVFRCACETHRLPLAQTWVSCIQQGKVGCWHSDKNNNHCVSTVDDACYVADPDMWGFREACSEHHLLKGQRVAGEAFLTNQPCFSNDITSLKKTEYPLSHHARMFGLCGAVAIRLRSILTGNSDFVLEFFLPKGCRDPEEQKKMLSSLSIVIQQVSRSLRVVTDKEMEEETSLPVSEVIFPSDGRPSREKILKVDSHSEKYSHDNSSQSACLTKVQRDCNVSLSQNGKPRKVLGKRILEGGHRKEDFSMKGTAEYFDDSNSVEGSFSSVALGKTGEKRRTKVDKTITLQVLQQYFAGRLKDAAKSIGVCPTTLKRICRQHGIKRWPSRKIKKVGHSLQKLQLVIDSVQGASGSFQIGSFYTNFPELASPNLSRSGASPFSNSLPTDQQKLTGMQAKGGTLSPQAAKSPSSSCSQSSNSSQCCTSWTQQHCSINNIAGSEDPVVGESFDDVVLKRVRSYEELHASSQEPRLLLRSQSYKSFREQPIPRLPENGCRMSQEVVDGRRVKVTYGEEKIRLRMQDNWKFQDLLQEIARRFNIDDMSLFDVKYLDDDSDWVLLTCDADLEECIDVCRSSEGQTIKLLLQVSHHLLERRSGSSGNS

SEQ ID NO: 34 - protein, 945 aa, Citrus unshiu
MDDGNFTPNPSFGAFPGTAMDLDFMDELLFDGCWLETTDALDFLQPGPSSSGPADDTSRYLPYSEGTTGHLSMNLNPQQQVYQEETKNKFTENPSLVYPKIEEIQDTRTQDHQGFDPATSSGQSGSFLAQGNELGRRWWIGPRENTGHSSSVKDRLMQAIIYLKDYIKDGKALVQIWVPINSGGKQLLTTDDQPYSLDPNSKSLESYRNVSTTYHFAADEDSKEFVGLPGRVFREQSPEWTPDVLFFRSEEYPRVNHAQQYDVHGSLALPVFERGSGACLGVVEVVTTSRKINYRLDLENVCKALEAVDLRSSGNFSTSCVKARNELYHAAMPEIAEVLRSVCKTHKLPLALTWAPCVQGRKVECQQSDENFPHCFLTVDSACFVANENLSGFFVACSEQQLLQGQGIVGKAFSLSKQCFTADITAFSKSNYPLSHLARMFGLRAAVAIPLRSITTGVVEFILEFFLPRECQDIEEQKQMVKSLSVAMQQVCQSLRLAMEKELEVVILPVGEMAVTSDGSSPSKETSQEQSSWISHMIEAQQKGKGVSVSWDHQEEPKEEFKMTTHWDDARAESFHKQVFPGFGQFQHNSGAKSSVEGGGDSSSLGGHLSVGSRKAGEKRRTKTEKTISLQVLRQYFAGSLKDAAKSIGVCPTTLKRICRQHGITRWPSRKIKKVGHSLRKLQLVIDSVQGAEGAIQIGSFYTTFPDLNSPIFSGSGTFSSMKINDHPEPSNAPPANGLFSTGAAVSKSPSSSCSQSSGSSNCCSTGAKLNTTNINALSSVDTKMVEDPGGMLKRARSDAELHALNQEEPKLLARSRSHKILGEHVSLESLPPLPKCGNHNLRDGSTFRVKASFGEEKIRFSLQPNWGFKDLQQEIARRFNIEDFNEIDLKYLDDDHEWVLLTCDADLEECIDIYKSSQSHTIKISLHRASHLKLVKVAHNNAPS

SEQ ID NO: 35 - protein, 920 aa, Citrus unshiu
MEDTVFLPGTMRGASLDSAMDLDYMNELLAEGCWLETIDGSEFPHPSPSTSTALFDSSFVWPASEITNGDTSRNPSQQGNQDDMQQSFFLQTSSMNDPQQNGPLSTPSLSQGMVNVDEDDGQLDDNITEGSELSKRRWIGPRANPGPATSIIQRLGWAVGYIKDFSINKDVLIQLWVPVIRAGRQVLTTYDQPFSLDLKCQRLANYRAISIKYYFSAEEDSKDVAGLPGRVFLGKAPEWTPDVQFFRSDEYPRVDHAQQYDVRGTLAVPVFEQGSRTCLGVIEVVMMTQKLKYRSELESVCKALEAWNTSYQAALPEIREVLRCACETHRLPLAQTWVSCIQQGKVGCWHSDKNNNHCVSTVDDACYIADPDMWGFQEACSEHHLLKGQRVAGEAFLTNQPCFSNDITSLKKTEYPLSHHARMFGLCGAVAIRLRSILTGNSDFVLEFFLPKGCRDPEEQKKMLSSLSIIIQQVSRSLRVVTDKEMEEETSLPVSEVIFPSDGRPSREKILKVDSHSEKYSHDNSSQSACLTKVQRDCDVSLNQNGKPRKVSGKRFLEGGHRKEDFSLKGSAEYCDDSNSVEGSFSSVALGKTGEKRRTKVDKTITLQVLQQYFSGSLKDAAKSIGVCPTTLKRICRQHGIKRWPSRKIKKVGHSLQKLQLVIDSVQGASGSFQIGSFYTNFPELASPNLSRSGASPFSNSLPTDQQKLTGMQAKGGTLSPQAQAAKSPSSSCSQSSNSSQCCTSGTQQHRSTNNIAGSEDPVVGESFDDVVLKRVRSYEELHASSQEPRLLPRSQSYKSFREQPIPRLPENGCRMSQEVVDGRRLKVTYGEEKIRLRMQDNWKFQDLLQEIARRFNIDDMSLFDVKYLDDDSDWVLLTCDADLEECIEVCRSSEGQTIKLLLQVSHHLFERRSGSSGNS

SEQ ID NO: 36 - protein, 941 aa, Cucumis melo
MDDGMLSPATMLDAPAETAMDLDYMDGLFLDGCWLETADGTEFLHTSPSSFGVNLDPLIGWPATDMNGDFNMTQISRSNQEEGRKISTDEMSLGRKRIDMGQEECSDQSENNGFEGSEMCRRLWIGPGEHLGSPTSVMERLIRAVGYIKDFVRDKDVLVQVWVPINRGGRNVLITNDLPFSQNSSCTRLTKYRDVSVTYEFTADEDSKKALGLPGRVFSRKVPEWTPDVRFFRSDEYPRVNHAHEHDVRGTVALPIFEQGSKNCLGVIEVVMVTQQVKYGSELENVCKALEAVKLRSSDVIGHPNKKQVFNRSNEAVLLEIQNTLKTACETHGLPLAQTWASCVQQSRGGCRHSDENYSCCVSTVDRACFVADQRIQEFHEACSEHHLLKGEGIVGMAFKSNEPCFSSDITSFCNTEYPLSHHAKLFGLHAAVAIRLRCIYISKTDFVLEFFLPVNCRDPEEQRVLLTSLSTIIQRSCRSLRLVTDKECREENMQQSCRSLHLVTDVKLGEESQFPFGEAGLGANGRSAMQDMSKVQNHQLETSHRTNSSVQNIQQHSGFVSFFQGGKPSEVLSSSGYQHRGFNYDLNGVVEDSDECTTVGNGTLPDVGLGKTGEKRRTKVDKTITLQVLRQYFAGSLKDAAKSIGVCPTTLKRICRQHGIKRWPSRKIKKVGHSLQKLQLVIDSVEGASGAFQIGSLYSNFQELASPNLSGSGSGPPFGAKMGDCLKTSNEVGMSNLQRAASKSPSSSCSQSSSSSQCFSSRSHQNIPHWNEAGSEDQMGGVNPCDGELKRVKSEVEIHVSIMEGSNVPRRSQSCKSLCKHPGAECVVHTAKESNGMAEAVEVQRVKVSFGEEKIRFRVHNRWRHEELLNEIAKRFSISDISKFDLKYLDDESEWVLLTSDTDLQECFHVYKSSRVQTIKLSLQVSRRHKRNFLASSGFS

SEQ ID NO: 37 - protein, 940 aa, Cucumis melo
MDDGMLSPATMLDAPAETAMDLDYMDGLFLDGCWLETADGTEFLHTSPSSFGVNLDPLIGWPATDMNGDFNMTQISRSNQEEGRKISTDEMSLGRKRIDMGQEECSDQSENNGFEGSEMCRRLWIGPGEHLGSPTSVMERLIRAVGYIKDFVRDKDVLVQVWVPINRGGRNVLITNDLPFSQNSSCTRLTKYRDVSVTYEFTADEDSKKALGLPGRVFSRKVPEWTPDVRFFRSDEYPRVNHAHEHDVRGTVALPIFEQGSKNCLGVIEVVMVTQQVKYGSELENVCKALEAVKLRSSDVIGHPNKKVFNRSNEAVLLEIQNTLKTACETHGLPLAQTWASCVQQSRGGCRHSDENYSCCVSTVDRACFVADQRIQEFHEACSEHHLLKGEGIVGMAFKSNEPCFSSDITSFCNTEYPLSHHAKLFGLHAAVAIRLRCIYISKTDFVLEFFLPVNCRDPEEQRVLLTSLSTIIQRSCRSLRLVTDKECREENMQQSCRSLHLVTDVKLGEESQFPFGEAGLGANGRSAMQDMSKVQNHQLETSHRTNSSVQNIQQHSGFVSFFQGGKPSEVLSSSGYQHRGFNYDLNGVVEDSDECTTVGNGTLPDVGLGKTGEKRRTKVDKTITLQVLRQYFAGSLKDAAKSIGVCPTTLKRICRQHGIKRWPSRKIKKVGHSLQKLQLVIDSVEGASGAFQIGSLYSNFQELASPNLSGSGSGPPFGAKMGDCLKTSNEVGMSNLQRAASKSPSSSCSQSSSSSQCFSSRSHQNIPHWNEAGSEDQMGGVNPCDGELKRVKSEVEIHVSIMEGSNVPRRSQSCKSLCKHPGAECVVHTAKESNGMAEAVEVQRVKVSFGEEKIRFRVHNRWRHEELLNEIAKRFSISDISKFDLKYLDDESEWVLLTSDTDLQECFHVYKSSRVQTIKLSLQVSRRHKRNFLASSGFS

SEQ ID NO: 38 - protein, 911 aa, Cucumis melo
MDDGMLSPATMLDAPAETAMDLDYMDGLFLDGCWLETADGTEFLHTSPSSFGVNLDPLIGWPATDMNGDFNMTQISRSNQEEGRKISTDEMSLGRKRIDMGQEECSDQSENNGFEGSEMCRRLWIGPGEHLGSPTSVMERLIRAVGYIKDFVRDKDVLVQVWVPINRGGRNVLITNDLPFSQNSSCTRLTKYRDVSVTYEFTADEDSKKALGLPGRVFSRKVPEWTPDVRFFRSDEYPRVNHAHEHDVRGTVALPIFEQGSKNCLGVIEVVMVTQQVKYGSELENVCKALEAVKLRSSDVIGHPNKKQVFNRSNEAVLLEIQNTLKTACETHGLPLAQTWASCVQQSRGGCRHSDENYSCCVSTVDRACFVADQRIQEFHEACSEHHLLKGEGIVGMAFKSNEPCFSSDITSFCNTEYPLSHHAKLFGLHAAVAIRLRCIYISKTDFVLEFFLPVNCRDPEEQRVLLTSLSTIIQRSCRSLRLVTDKECREENMQQSCRSLHLVTDVKLGEESQFPFGEAGLGANGRSAMQDMSKGGKPSEVLSSSGYQHRGFNYDLNGVVEDSDECTTVGNGTLPDVGLGKTGEKRRTKVDKTITLQVLRQYFAGSLKDAAKSIGVCPTTLKRICRQHGIKRWPSRKIKKVGHSLQKLQLVIDSVEGASGAFQIGSLYSNFQELASPNLSGSGSGPPFGAKMGDCLKTSNEVGMSNLQRAASKSPSSSCSQSSSSSQCFSSRSHQNIPHWNEAGSEDQMGGVNPCDGELKRVKSEVEIHVSIMEGSNVPRRSQSCKSLCKHPGAECVVHTAKESNGMAEAVEVQRVKVSFGEEKIRFRVHNRWRHEELLNEIAKRFSISDISKFDLKYLDDESEWVLLTSDTDLQECFHVYKSSRVQTIKLSLQVSRRHKRNFLASSGFS

SEQ ID NO: 39 - protein, 686 aa, Cucumis melo
MDDGMLSPATMLDAPAETAMDLDYMDGLFLDGCWLETADGTEFLHTSPSSFGVNLDPLIGWPATDMNGDFNMTQISRSNQEEGRKISTDEMSLGRKRIDMGQEECSDQSENNGFEGSEMCRRLWIGPGEHLGSPTSVMERLIRAVGYIKDFVRDKDVLVQVWVPINRGGRNVLITNDLPFSQNSSCTRLTKYRDVSVTYEFTADEDSKKALGLPGRVFSRKVPEWTPDVRFFRSDEYPRVNHAHEHDVRGTVALPIFEQGSKNCLGVIEVVMVTQQVKYGSELENVCKALEAVKLRSSDVIGHPNKKQVFNRSNEAVLLEIQNTLKTACETHGLPLAQTWASCVQQSRGGCRHSDENYSCCVSTVDRACFVADQRIQEFHEACSEHHLLKGEGIVGMAFKSNEPCFSSDITSFCNTEYPLSHHAKLFGLHAAVAIRLRCIYISKTDFVLEFFLPVNCRDPEEQRVLLTSLSTIIQRSCRSLRLVTDKECREENMQQSCRSLHLVTDVKLGEESQFPFGEAGLGANGRSAMQDMSKVQNHQLETSHRTNSSVQNIQQHSGFVSFFQGGKPSEVLSSSGYQHRGFNYDLNGVVEDSDECTTVGNGTLPDVGLGKTGEKRRTKVDKTITLQVLRQYFAGSLKDAAKSIGVCPTTLKRICRQHGIKRWPSRKIKKVQVQVHLLVQRWEIA

SEQ ID NO: 40 - protein, 941 aa, Cucumis sativus
MDDGMLSPATMLDAPAETAMDLDYMDGLFLDGCWLETADGTEFLHTSPSSFGVNLDALIGWPATEMNGDFNMTQISRSNQEEERKISTDEMSLGRKRIDMGQEGCSGQSENNGFGGSELCRRLWIGPGEHLGTPTSVMERLITAVGYIKDFVRDKDVLVQVWVPINRGGRSVLITNDLPFSQNSSCTRLTKYRDVSVTYEFTADEDSKKALGLPGRVFSRKVPEWTPDVRFFRSDEYPRVNHAHEHDVRGTVALPIFEQGSKNCLGVIEVVMVTQQIKYGSELENVCKALEAVKLRSSDVMGHPNKKVFNRSNEAVLQEIQNTLKSACETHGLPLAQTWASCMQQSRGGCRHSDENYSCCVSTVDRACFVADQRIQEFHEACSEHHLLKGEGIVGMAFKSNEPCFSSDITSFCNTEYPLSHHAKLFGLHAAVAIRLRCIYISKTDFVLEFFLPVNCRNPEDQRVLLTSLSTIIQRSCRSLRLVTDRECSEENMQQSYRSLHLVTDVKLGEQSKFPFGEAGFVANGRSAMQEMSKVQNHQLETSHPTTSSVQNIQQHSGFVSFFQGGKPSEVLSSSGYQHRGFNYDLNGVVEDSEECATVGNGSFPDVGLGKTGEKRRTKVDKTITLQVLRQYFAGSLKDAAKSIGVCPTTLKRICRQHGIKRWPSRKIKKVGHSLQKLQLVIDSVEGASGAFQIGSLYSNFQELASPNLSGSGSGPPFGAKMGDCLKTSNEVGMSNLQGAASKSPSSSCSQSSSSSQCFSSRSNQNLPHWNEAGSEDQMGGGVNPCDGELKRVKSEVEIHVSIMEGSNVPRRSQSCKSLCKHPATECAMHTAKESNGMAEAVEVQRVKVSFGEEKIRFRVHNRWGYEELLNEIAKRFSISDISKFDLKYLDDESEWVLITSDTDLQECFHVYKSSQVQTIKLSLQVSRRHKRNYLASSGFS

SEQ ID NO: 41 - protein, 942 aa, Cucumis sativus
MDDGMLSPATMLDAPAETAMDLDYMDGLFLDGCWLETADGTEFLHTSPSSFGVNLDALIGWPATEMNGDFNMTQISRSNQEEERKISTDEMSLGRKRIDMGQEGCSGQSENNGFGGSELCRRLWIGPGEHLGTPTSVMERLITAVGYIKDFVRDKDVLVQVWVPINRGGRSVLITNDLPFSQNSSCTRLTKYRDVSVTYEFTADEDSKKALGLPGRVFSRKVPEWTPDVRFFRSDEYPRVNHAHEHDVRGTVALPIFEQGSKNCLGVIEVVMVTQQIKYGSELENVCKALEAVKLRSSDVMGHPNKKQVFNRSNEAVLQEIQNTLKSACETHGLPLAQTWASCMQQSRGGCRHSDENYSCCVSTVDRACFVADQRIQEFHEACSEHHLLKGEGIVGMAFKSNEPCFSSDITSFCNTEYPLSHHAKLFGLHAAVAIRLRCIYISKTDFVLEFFLPVNCRNPEDQRVLLTSLSTIIQRSCRSLRLVTDRECSEENMQQSYRSLHLVTDVKLGEQSKFPFGEAGFVANGRSAMQEMSKVQNHQLETSHPTTSSVQNIQQHSGFVSFFQGGKPSEVLSSSGYQHRGFNYDLNGVVEDSEECATVGNGSFPDVGLGKTGEKRRTKVDKTITLQVLRQYFAGSLKDAAKSIGVCPTTLKRICRQHGIKRWPSRKIKKVGHSLQKLQLVIDSVEGASGAFQIGSLYSNFQELASPNLSGSGSGPPFGAKMGDCLKTSNEVGMSNLQGAASKSPSSSCSQSSSSSQCFSSRSNQNLPHWNEAGSEDQMGGGVNPCDGELKRVKSEVEIHVSIMEGSNVPRRSQSCKSLCKHPATECAMHTAKESNGMAEAVEVQRVKVSFGEEKIRFRVHNRWGYEELLNEIAKRFSISDISKFDLKYLDDESEWVLITSDTDLQECFHVYKSSQVQTIKLSLQVSRRHKRNYLASSGFS

SEQ ID NO: 42 - protein, 912 aa, Cucumis sativus
MDDGMLSPATMLDAPAETAMDLDYMDGLFLDGCWLETADGTEFLHTSPSSFGVNLDALIGWPATEMNGDFNMTQISRSNQEEERKISTDEMSLGRKRIDMGQEGCSGQSENNGFGGSELCRRLWIGPGEHLGTPTSVMERLITAVGYIKDFVRDKDVLVQVWVPINRGGRSVLITNDLPFSQNSSCTRLTKYRDVSVTYEFTADEDSKKALGLPGRVFSRKVPEWTPDVRFFRSDEYPRVNHAHEHDVRGTVALPIFEQGSKNCLGVIEVVMVTQQIKYGSELENVCKALEAVKLRSSDVMGHPNKKQVFNRSNEAVLQEIQNTLKSACETHGLPLAQTWASCMQQSRGGCRHSDENYSCCVSTVDRACFVADQRIQEFHEACSEHHLLKGEGIVGMAFKSNEPCFSSDITSFCNTEYPLSHHAKLFGLHAAVAIRLRCIYISKTDFVLEFFLPVNCRNPEDQRVLLTSLSTIIQRSCRSLRLVTDRECSEENMQQSYRSLHLVTDVKLGEQSKFPFGEAGFVANGRSAMQEMSKGGKPSEVLSSSGYQHRGFNYDLNGVVEDSEECATVGNGSFPDVGLGKTGEKRRTKVDKTITLQVLRQYFAGSLKDAAKSIGVCPTTLKRICRQHGIKRWPSRKIKKVGHSLQKLQLVIDSVEGASGAFQIGSLYSNFQELASPNLSGSGSGPPFGAKMGDCLKTSNEVGMSNLQGAASKSPSSSCSQSSSSSQCFSSRSNQNLPHWNEAGSEDQMGGGVNPCDGELKRVKSEVEIHVSIMEGSNVPRRSQSCKSLCKHPATECAMHTAKESNGMAEAVEVQRVKVSFGEEKIRFRVHNRWGYEELLNEIAKRFSISDISKFDLKYLDDESEWVLITSDTDLQECFHVYKSSQVQTIKLSLQVSRRHKRNYLASSGFS

SEQ ID NO: 43 - protein, 686 aa, Cucumis sativus
MDDGMLSPATMLDAPAETAMDLDYMDGLFLDGCWLETADGTEFLHTSPSSFGVNLDALIGWPATEMNGDFNMTQISRSNQEEERKISTDEMSLGRKRIDMGQEGCSGQSENNGFGGSELCRRLWIGPGEHLGTPTSVMERLITAVGYIKDFVRDKDVLVQVWVPINRGGRSVLITNDLPFSQNSSCTRLTKYRDVSVTYEFTADEDSKKALGLPGRVFSRKVPEWTPDVRFFRSDEYPRVNHAHEHDVRGTVALPIFEQGSKNCLGVIEVVMVTQQIKYGSELENVCKALEAVKLRSSDVMGHPNKKQVFNRSNEAVLQEIQNTLKSACETHGLPLAQTWASCMQQSRGGCRHSDENYSCCVSTVDRACFVADQRIQEFHEACSEHHLLKGEGIVGMAFKSNEPCFSSDITSFCNTEYPLSHHAKLFGLHAAVAIRLRCIYISKTDFVLEFFLPVNCRNPEDQRVLLTSLSTIIQRSCRSLRLVTDRECSEENMQQSYRSLHLVTDVKLGEQSKFPFGEAGFVANGRSAMQEMSKVQNHQLETSHPTTSSVQNIQQHSGFVSFFQGGKPSEVLSSSGYQHRGFNYDLNGVVEDSEECATVGNGSFPDVGLGKTGEKRRTKVDKTITLQVLRQYFAGSLKDAAKSIGVCPTTLKRICRQHGIKRWPSRKIKKVQVQVHLLVQRWEIA

SEQ ID NO: 44 - protein, 915 aa, Cucurbita maxima
MEDCMLSPATMLDAPAEAAMDLDYMDGLLLEGCWLETAEGTEFLHPSTASFGANLDPLIAWPTTDMNGDFHMSQITRTNHEEPRRILTDEASMGRGRVDMEQEGCSGQSENHGFEGSELCRRLWIGPGDHLGSASSVMEKLIRAVGYIKDFVRDKDVLVQVWVPINRGGRNVLITNDLPFSQNSSCTRLTKYRDVSVKYEFTADDDSKNALGLPGRVFSRKVPEWTPDVRFFRSDEYPRVNHAHEHDVRGTVALPIFEQGSKNCLGVIEVVMVTQQIKYGSELESVCKALEAVKLRSSDVIGHPDKKQVFNRSNEAVLQEIQNTLKSACETHGLPLAQTWASCIQQNREGCRHSDENYSCCVSTVDRACFVADPRVQEFHEACSEHHLLKGEGIVGMAFKSNEPCFSSDITSFCNTEYPLSHHAKLFRLHAAVAIRLRCIYNSKTDFVLEFFLPVDCRDPEEQRVLLTSLSTIIQRSCRSLRLVNDKECREENMQQSCRRSKVEHQQLEMSHPTNSLLTSSVQNIQQQSGFVSLFQDGKTSEILSSSGYQHHELNYNLNGVVEDSEECATVGNSCFSDTGLGRTGEKRRTKVDKTITLQVLRQYFAGSLKDAAKSIGVCPTTLKRICRQHGIKRWPSRKIKKVGHSLQKLQLVIDSVEGASGAFQIGSLYSNFQDLASPNLSGSGPVLSAKMGDCMKTSSNPNEVGMSNLQGGGASKSPSSSCSQSSSSNQCFSSRSHRSVGHWNKGGSEDQMGGGENPCDGELKRVKSEVEIHVSIMEGSNIPRRSQSCKSLCKHPATECLVHSANEGDGMAERVEVQKVKVSYGEEKIRFRVHNQWRYEELLNEVGKRFSISDMSKFDLKYLDDESEWVLLTSDTDLEECFHVYKSCRIQTIRLSVQESRRHKRNCVVSGGFS

SEQ ID NO: 45 - protein, 914 aa, Cucurbita maxima
MEDCMLSPATMLDAPAEAAMDLDYMDGLLLEGCWLETAEGTEFLHPSTASFGANLDPLIAWPTTDMNGDFHMSQITRTNHEEPRRILTDEASMGRGRVDMEQEGCSGQSENHGFEGSELCRRLWIGPGDHLGSASSVMEKLIRAVGYIKDFVRDKDVLVQVWVPINRGGRNVLITNDLPFSQNSSCTRLTKYRDVSVKYEFTADDDSKNALGLPGRVFSRKVPEWTPDVRFFRSDEYPRVNHAHEHDVRGTVALPIFEQGSKNCLGVIEVVMVTQQIKYGSELESVCKALEAVKLRSSDVIGHPDKKVFNRSNEAVLQEIQNTLKSACETHGLPLAQTWASCIQQNREGCRHSDENYSCCVSTVDRACFVADPRVQEFHEACSEHHLLKGEGIVGMAFKSNEPCFSSDITSFCNTEYPLSHHAKLFRLHAAVAIRLRCIYNSKTDFVLEFFLPVDCRDPEEQRVLLTSLSTIIQRSCRSLRLVNDKECREENMQQSCRRSKVEHQQLEMSHPTNSLLTSSVQNIQQQSGFVSLFQDGKTSEILSSSGYQHHELNYNLNGVVEDSEECATVGNSCFSDTGLGRTGEKRRTKVDKTITLQVLRQYFAGSLKDAAKSIGVCPTTLKRICRQHGIKRWPSRKIKKVGHSLQKLQLVIDSVEGASGAFQIGSLYSNFQDLASPNLSGSGPVLSAKMGDCMKTSSNPNEVGMSNLQGGGASKSPSSSCSQSSSSNQCFSSRSHRSVGHWNKGGSEDQMGGGENPCDGELKRVKSEVEIHVSIMEGSNIPRRSQSCKSLCKHPATECLVHSANEGDGMAERVEVQKVKVSYGEEKIRFRVHNQWRYEELLNEVGKRFSISDMSKFDLKYLDDESEWVLLTSDTDLEECFHVYKSCRIQTIRLSVQESRRHKRNCVVSGGFS

SEQ ID NO: 46 - protein, 797 aa, Cucurbita maxima
MLEAPADIAMDFDYMDGLLLDDCWLETADGAVFLHPNLSSFGANLDPLIGWPATEMNGVFNTNLITRSDQEEPRNMLSNEASPGQERVDVGQEGCSDQSENDALEGSELCRRLGMGAGEHMGSAPSVMERLIMAVGYIKDIVRDKDVLVQVWVPVSRGERSVLITNQLPFSQNSSCTRLAKYRDVSVNYEFTADEDSKKALGLPGRVFLRKVPEWTPDVRFFRSDEYPRVDHAHEHDVRGTIALPVFEQGSKSCLGVIEVVMVTQQIKYGSEHEILCKALQAVKLRSSDVISPPNRKVFNRFNEAVLLEIRDTLRTACETHGLPLAQAWASCIQESKEGCRHSDENYSCCVSTVDRACFVADTRIQDFHEACSEHHLLKGEGIVGMAFKSNKPCFSSDITSFRNTDYPLSHHAKLFGLHAAVALRLRCIFISKTDFVLEFFLPVHCRDPEDQRILLSSLSTVIQYSCRNLRLVTDKECREENMEQVHPTSSLLASSVQNIQQCSGSVSLFQELNYDLNGVVEDSEECPTVGNGIFADTSMGRTGEKRRNKVEKSITLEVLRQYFAGSLKDAAKSIGVCPTTLKRICRQHGIKRWPSRKIKKVGHSLQKLRLVIDSVNSASGAFQTSSLYSNLQELASPYVRKMGDGLKTSGDLGDAASKTAPSSLSQSSNSSQCFSFCRHPATGCVMQTAKESDQMRVKVSYGEERIRFRVQKWWSYKELVKEVGRRFNIRDTSKYELKYLDDECEWVLLTSDAYLQDCFHMYKSSPLQTIKLLLHPSPRHKREEPQTPPFPTFYML

SEQ ID NO: 47 - protein, 917 aa, Cucurbita moschata
MEDCMLSPATMLDAPAEAAMDLDYMDGLLLEGCWLETAEGTEFLHPSTASFGANLDPLIAWPATDMNGDFHMSQITRANQEEPRRILTDEASMGRGRVDMEQEGCSGQSENHGFEGSELCRRLWIGPGDHLGSASSVMEKLIRAVGYIKDFVRDKDVLVQVWVPINRGGRSVLITNDLPFSQNSSCTRLTKYRDVSVKYEFTADDDSKNALGLPGRVFSRKVPEWTPDVRFFRSDEYPRVNHAHEHDVRGTVALPIFEQGSKNCLGVIEVVMVTQQIKYGSELESVCKALEAVKLRSSDVIGHPDKKQVFNRSNEAVLLEIQNTLKSACETHGLPLAQTWASCIQQNREGCRHSDENYSCCVSTVDRACFVADPRVQEFHEACSEHHLLKGEGIVGMAFKSNEPCFSSDITSFCNTEYPLSHHAKLFGLHAAVAIRLRCIYISKTDFVLEFFLPVDCIDPEEQRVLLTSLSTIIQRSCRSLRLVNDKECREENMQQSCRRSKVEHHQLEMSHPTNSLLTSSVQNIQQQSGFVSLFQDGKTSEILSSSGYQHHELNYNLNGVVEDSEECATVGNSCFSDTGLGRTGEKRRTKVDKTITLQVLRQYFAGSLKDAAKSIGVCPTTLKRICRQHGIKRWPSRKIKKVGHSLQKLQLVIDSVEGASGAFQIGSLYSNFQDLASPNLSGSGSGPVLSAKMGDCMKTSSNPNEVGMSNLQGGGASKSPSSSCSQSSSSNQCFSSRSHKNVGHWNKGGSEDQMGGGENPCDGELKRVKSEVEIHVSIMEGSNIPRRSQSCKSLCKHPATECLVHTAKEGDGMAERVEVQKVKVSYGEEKIRFRVHNQWRYEELLNEVGKRFSISDMTKFDLKYLDDESEWVLLTSDTDLQECFHVYKSCRIQTIRLLVQESRRHKRNCVASGGFS

SEQ ID NO: 48 - protein, 916 aa, Cucurbita moschata
MEDCMLSPATMLDAPAEAAMDLDYMDGLLLEGCWLETAEGTEFLHPSTASFGANLDPLIAWPATDMNGDFHMSQITRANQEEPRRILTDEASMGRGRVDMEQEGCSGQSENHGFEGSELCRRLWIGPGDHLGSASSVMEKLIRAVGYIKDFVRDKDVLVQVWVPINRGGRSVLITNDLPFSQNSSCTRLTKYRDVSVKYEFTADDDSKNALGLPGRVFSRKVPEWTPDVRFFRSDEYPRVNHAHEHDVRGTVALPIFEQGSKNCLGVIEVVMVTQQIKYGSELESVCKALEAVKLRSSDVIGHPDKKVFNRSNEAVLLEIQNTLKSACETHGLPLAQTWASCIQQNREGCRHSDENYSCCVSTVDRACFVADPRVQEFHEACSEHHLLKGEGIVGMAFKSNEPCFSSDITSFCNTEYPLSHHAKLFGLHAAVAIRLRCIYISKTDFVLEFFLPVDCIDPEEQRVLLTSLSTIIQRSCRSLRLVNDKECREENMQQSCRRSKVEHHQLEMSHPTNSLLTSSVQNIQQQSGFVSLFQDGKTSEILSSSGYQHHELNYNLNGVVEDSEECATVGNSCFSDTGLGRTGEKRRTKVDKTITLQVLRQYFAGSLKDAAKSIGVCPTTLKRICRQHGIKRWPSRKIKKVGHSLQKLQLVIDSVEGASGAFQIGSLYSNFQDLASPNLSGSGSGPVLSAKMGDCMKTSSNPNEVGMSNLQGGGASKSPSSSCSQSSSSNQCFSSRSHKNVGHWNKGGSEDQMGGGENPCDGELKRVKSEVEIHVSIMEGSNIPRRSQSCKSLCKHPATECLVHTAKEGDGMAERVEVQKVKVSYGEEKIRFRVHNQWRYEELLNEVGKRFSISDMTKFDLKYLDDESEWVLLTSDTDLQECFHVYKSCRIQTIRLLVQESRRHKRNCVASGGFS

SEQ ID NO: 49 - protein, 788 aa, Cucurbita moschata
MDFDYMDGLLLDDCWLETADGTVFLHPNLSSFGANLDPLIGWPATEMNGVFNTNLITRSDQEEPRNMLSNEASPGRERVDVGQEGCSDQSENNALEGSELCRRLGMGAGEHMGSAPSVMERLIMAVGYIKDIVRDKDVLVQVWVPVSRGGRSVLITNQLPFSQNSSCTRLAKYRDVSVNYEFTADEDSKKALGLPGRVFLRKVPEWTPDVRFFRSDEYPRVDHAHEHDVRGTIALPVFEQGSKSCLGVIEVVMVTQQIKYGSEHEILCKALQAVKLRSSDVISPPNQKVFNRFNEAVLLEIRDTLRTACETHGLPLAQAWASCIQQSKEGCRHSDENYSCCVSTVDRACFVADTRIQDFHEACSEHHLLKGEGIVGMAFKSNEPCFSSDITSFRNTEYPLSHHAKLFGLHAAVALRLRCIFISKTDFVLEFFLPVHCRDPEEQRILLTSLSTVIQYSCRNLRLVTDKECREENMEQLHPTNSLLASSVQNIQQCSGSVSLLQELNYDQNGVVEDSEECPTVGNGIFADISMGRTGEKRRTKVEKSITLEVLRQYFAGSLKDAAKSIGVCPTTLKRICRQHGIKRWPSRKIKKVGHSLQKLQLVIDSVNSASGAFQTSSLYSNLQELASPYVRKMGDGLKASSNIRDAASKTAPSSLSQSSNSSQCFSFCRHPATGCVMQTAKESDQMRVKVSYGEERIRFRVQKWWRYEELVKEVGRRFNIRDISKYDLKYLDDECEWVLLTSDAYLQDCFHMYKSSPLQTIKLLLLPSPRHKREEPQTPSFPTFYML

SEQ ID NO: 50 - protein, 757 aa, Cucurbita moschata
MFVLPKHGLEFLLLEMNGVFNTNLITRSDQEEPRNMLSNEASPGRERVDVGQEGCSDQSENNALEGSELCRRLGMGAGEHMGSAPSVMERLIMAVGYIKDIVRDKDVLVQVWVPVSRGGRSVLITNQLPFSQNSSCTRLAKYRDVSVNYEFTADEDSKKALGLPGRVFLRKVPEWTPDVRFFRSDEYPRVDHAHEHDVRGTIALPVFEQGSKSCLGVIEVVMVTQQIKYGSEHEILCKALQAVKLRSSDVISPPNQKVFNRFNEAVLLEIRDTLRTACETHGLPLAQAWASCIQQSKEGCRHSDENYSCCVSTVDRACFVADTRIQDFHEACSEHHLLKGEGIVGMAFKSNEPCFSSDITSFRNTEYPLSHHAKLFGLHAAVALRLRCIFISKTDFVLEFFLPVHCRDPEEQRILLTSLSTVIQYSCRNLRLVTDKECREENMEQLHPTNSLLASSVQNIQQCSGSVSLLQELNYDQNGVVEDSEECPTVGNGIFADISMGRTGEKRRTKVEKSITLEVLRQYFAGSLKDAAKSIGVCPTTLKRICRQHGIKRWPSRKIKKVGHSLQKLQLVIDSVNSASGAFQTSSLYSNLQELASPYVRKMGDGLKASSNIRDAASKTAPSSLSQSSNSSQCFSFCRHPATGCVMQTAKESDQMRVKVSYGEERIRFRVQKWWRYEELVKEVGRRFNIRDISKYDLKYLDDECEWVLLTSDAYLQDCFHMYKSSPLQTIKLLLLPSPRHKREEPQTPSFPTFYML

SEQ ID NO: 51 - protein, 788 aa, Cucurbita pepo
  subsp. pepo
MDFDYMDGLLLDDCWLETADGTVFLHPNLSSFGANLDPLIGWPATEMNGVFNTNLITRSDQEEPRNMLSNEASPGRERVDVGQEGCSDQSENNALEGSELCRRLGMGAGEHMGSAPSVMERLIMAVEYIKDIVRDKDVLVQVWVPVSRGGRSVLITNQLPFSQNSSCTRLAKYRDVSVNYEFTADEESKKALGLPGRVFLRKVPEWTPDVRFFRSDEYPRVDHAHEHDVRGTIALPVFEQGSKSCLGVIEVVMVTQQIKYGSEHEILCKALQAVKLRSSDVISPPNQKVFNRFNEAVLLEIRDTLRTACETHGLPLAQAWASCIQQSKEGCRHSDENYSCCVSTVDRACFVADTRIQDFHEACSEHHLLKGEGIVGMAFKSNEPCFSSDIASFRNTEYPLSHHAKLFGLHAAVALRLRCIFISKMDFVLEFFLPVHCRDPEEQRILLTSLSTVIQYSCRNLRLVTDEECREENMEQPLPTNSLLASSVQNIQQCSGSVSLLQELNYDLNGVVEDSEECPTVGNGIFADISMGRTGEKRRTKVEKSITLEVLRQYFAGSLKDAAKSIGVCPTTLKRICRQHGIKRWPSRKIKKVGHSLQKLQLVIDSVNSASGAFQTSSLYSNLQELASPYVRKMGDGLKTSSDLGDAASKTAPSSLSQSSNSSQCFSFCRHPATGCVMQTAKESDQMRVKVSYGEERIRFRVQKWWRYEELVKEVGRRFNIRDISKYDLKYLDDECEWVLLTSDAYLQDCFHMYKSSPLQTIKLLLHPSPRHMREEPQTPPFPTFYML

SEQ ID NO: 52 - protein, 757 aa, Cucurbita pepo
  subsp. pepo
MFVLPKHGLEFLLLEMNGVFNTNLITRSDQEEPRNMLSNEASPGRERVDVGQEGCSDQSENNALEGSELCRRLGMGAGEHMGSAPSVMERLIMAVEYIKDIVRDKDVLVQVWVPVSRGGRSVLITNQLPFSQNSSCTRLAKYRDVSVNYEFTADEESKKALGLPGRVFLRKVPEWTPDVRFFRSDEYPRVDHAHEHDVRGTIALPVFEQGSKSCLGVIEVVMVTQQIKYGSEHEILCKALQAVKLRSSDVISPPNQKVFNRFNEAVLLEIRDTLRTACETHGLPLAQAWASCIQQSKEGCRHSDENYSCCVSTVDRACFVADTRIQDFHEACSEHHLLKGEGIVGMAFKSNEPCFSSDIASFRNTEYPLSHHAKLFGLHAAVALRLRCIFISKMDFVLEFFLPVHCRDPEEQRILLTSLSTVIQYSCRNLRLVTDEECREENMEQPLPTNSLLASSVQNIQQCSGSVSLLQELNYDLNGVVEDSEECPTVGNGIFADISMGRTGEKRRTKVEKSITLEVLRQYFAGSLKDAAKSIGVCPTTLKRICRQHGIKRWPSRKIKKVGHSLQKLQLVIDSVNSASGAFQTSSLYSNLQELASPYVRKMGDGLKTSSDLGDAASKTAPSSLSQSSNSSQCFSFCRHPATGCVMQTAKESDQMRVKVSYGEERIRFRVQKWWRYEELVKEVGRRFNIRDISKYDLKYLDDECEWVLLTSDAYLQDCFHMYKSSPLQTIKLLLHPSPRHMREEPQTPPFPTFYML

SEQ ID NO: 53 - protein, 917 aa, Cucurbita pepo
  subsp. pepo
MEDCMLSPATMLDAPAEAAMDLDYMDGLLLEGCWLETAEGTEFLHPSTASFGANLDPLIAWPATDMNGDFHMSQITRTNQEEPRRILTDEASMGRGRVDMEQEGCSGQSENHGFEGSELCRRLWIGPGDHLGSASSVMEKLIRAVGYIKDFVRDKDVLVQVWVPINRGGRSVLITNDLPFSQNSSCTRLSKYRDVSVKYEFTADDDSKNALGLPGRVFSRKVPEWTPDVRFFRSDEYPRVNHAHEHDVRGTVALPIFEQGSKNCLGVIEVVMVTQQIKYGSELESVCKALEAVKLRSSDVIGHPDKKQVFNRSNEAVLQEIQNTLKSACETHGLPLAQTWASCIQQNREGCRHSDENYSCCVSTVDRACFVADPRVQEFHEACSEHHLLKGEGIVGMAFKSNEPCFSSDITSFCNTEYPLSHHAKLFGLHAAVAIRLRCIYINKTDFVLEFFLPVDCIDPEEQRVLLTSLSTIIQRSCRSLRLVNDKECREENMQQSCRRSKVEHHQLEISHPTNSLLTSSVQNIQQQSGFVSLFQDGKTSEMLSSSGYQHHELNYNLNGVVEDSEECATVGNSCFSDTGLGRTGEKRRTKVDKTITLQVLRQYFAGSLKDAAKSIGVCPTTLKRICRQHGIKRWPSRKIKKVGHSLQKLQLVIDSVEGASGAFQIGSLYSNFQDLASPNLSGSGSGPVVSAKMGDCMKTSSNPNEVGMSNLQGGGASKSPSSSCSQSSSSNQCFSSRSHKNVGHWNKGGSEDQMGGGENPCDGELKRVKSEVEIHVSIMEGSNIPRRSQSCKSLCKHPATECLVHSAKEGDGMAERVEVQKVKVSYGEEKIRFRVHNQWRYEELLNEVGKRFSISDMTKFDLKYLDDESEWVLLTSDTDLQECFHVYKSCRIQTIRLLVQESRRRKRNCVASGGFS

SEQ ID NO: 54 - protein, 916 aa, Cucurbita pepo
  subsp. pepo
MEDCMLSPATMLDAPAEAAMDLDYMDGLLLEGCWLETAEGTEFLHPSTASFGANLDPLIAWPATDMNGDFHMSQITRTNQEEPRRILTDEASMGRGRVDMEQEGCSGQSENHGFEGSELCRRLWIGPGDHLGSASSVMEKLIRAVGYIKDFVRDKDVLVQVWVPINRGGRSVLITNDLPFSQNSSCTRLSKYRDVSVKYEFTADDDSKNALGLPGRVFSRKVPEWTPDVRFFRSDEYPRVNHAHEHDVRGTVALPIFEQGSKNCLGVIEVVMVTQQIKYGSELESVCKALEAVKLRSSDVIGHPDKKVFNRSNEAVLQEIQNTLKSACETHGLPLAQTWASCIQQNREGCRHSDENYSCCVSTVDRACFVADPRVQEFHEACSEHHLLKGEGIVGMAFKSNEPCFSSDITSFCNTEYPLSHHAKLFGLHAAVAIRLRCIYINKTDFVLEFFLPVDCIDPEEQRVLLTSLSTIIQRSCRSLRLVNDKECREENMQQSCRRSKVEHHQLEISHPTNSLLTSSVQNIQQQSGFVSLFQDGKTSEMLSSSGYQHHELNYNLNGVVEDSEECATVGNSCFSDTGLGRTGEKRRTKVDKTITLQVLRQYFAGSLKDAAKSIGVCPTTLKRICRQHGIKRWPSRKIKKVGHSLQKLQLVIDSVEGASGAFQIGSLYSNFQDLASPNLSGSGSGPVVSAKMGDCMKTSSNPNEVGMSNLQGGGASKSPSSSCSQSSSSNQCFSSRSHKNVGHWNKGGSEDQMGGGENPCDGELKRVKSEVEIHVSIMEGSNIPRRSQSCKSLCKHPATECLVHSAKEGDGMAERVEVQKVKVSYGEEKIRFRVHNQWRYEELLNEVGKRFSISDMTKFDLKYLDDESEWVLLTSDTDLQECFHVYKSCRIQTIRLLVQESRRRKRNCVASGGFS

SEQ ID NO: 55 - protein, 658 aa, Eucalyptus grandis
MTTQKIQYRPEIQSVCKALEAFDLRSSEVFGNLSEESHWKSYEAAIPEIREVLRSACETHGLPLAQTWVPCSQQGKGGCRHSNENYVHCVSTIDHACHVADPLLQPFHEACSEHHLLKGQGVVGRAFQTNQPCFSSDITSSGRTEYPLSHHARMFGLCAAVAIRLRSIHTGTADFVLEFFLPMDCKDHDKQKKMLGSLSIIIQQVCQSLRVITNEELEEETVLPEIPVPSEGRPQGEWSLEVESNYLERCSEEDLSWSAHVEKVQQSDTVASATQKARAGESFVEKSLDFGQFQDSSTERGEDCSFYGEGRCSDAAREKTGDKKRTKAEKAITLQVLRQYFAGSLKDAAKSLGVCPTTLKRICRQHGIKRWPSRKIKKVGHSLQKLQLVMDTVRVQGAPGPLQIDSFYTNFPELASPNLSITSPLSASNHGDHLQPLGTQPGALNFDSCAAVSKSTSSSCSHSSSSSQCCSSGTKQHPSIVDLVAEEDHLVSENNVDITPSKMVQSHVELQGSSQEEQKLLPRSQSRRSFNPNMENPPRPPPQYNCQASREGDPLRVKVACADENIRFRMQKDWDLKDLWGEIARRFCIEDTSKFDLKYLDDDSEWVLLTCDADLDECIDVSRSSPGSTVKLSVRKSHHRRLGSSLGSSGPPRMHGAS

SEQ ID NO: 56 - protein, 924 aa, Eucalyptus grandis
MEDGPPTPKSPFENISDDKMDLDLLDDFFLDGCWVETAAAFSLFPQSPTFAAPNEAPNHSLSEETLTGIPSTDSYQNAFQEETRGNTAPGIPPSADPQTSELAESRIQDVNSVGNATSLGQVEGTEVSQSLWVAPKSSLGLSSSIKLRLMQAISHLSESSKGKDMLIQIWVPVGREGRKVLTTDDQPFSLGLSSRSLQRYRSVSKSYQFQADDGSKDHLGLPGRAFLGKLPEWTPDVRLFSTEEYPRINYARQYDVRGSLAVPVFERGSGTCLGVVEIVTTSEKINCRSDLENVCKALEAVDLRSTQSFNPSIVKVDVLYEAVIPRILEALKSVTKTYNLPLALTWASCIKQGKEGCRHSDENYSLCLSTMDSACLVVDLEMRGFHEACSEHHLLKGQGIVGKAFTTDKPSFSNDVTAISHTEYPLSHHARLFRLQSALAIPVINIYTGLAEFVLELFLPKDCGDMEEGKRMLNFLCADIHQAFQNSQFFTEKDLSGAIVLPFKETEIATEKKLQKKETEVASSSRKRTSSDESSWMAHMVETQTKGNGVSISSTYDMGTKEPFNITTQHQEFWHLQQDSEHITGVEGRSDSLSLSQHSRGSGKDGQKRQTKMEKTITVDVLRQYFAGSLKDAAKELGVCPTTLKRICRQHGIARWPSRKIKKVNHSLKKLQHVIDSVQGAKGTIKLGSFYESFPELSTEISGEGPSSSKQSDPPKKTDHQPDINIDNSAATISKSPSASCSQCSTSTTSGSNEANVHSTTILASSGRNDQISEDPFELLKRARSHAELHEPQILARSHSHMSFDQHPLPNIQGHHLQDGLIFRVKAMFGEEKIRLVLQPTWGFADLRQEIAKRFSIDDVGGIDLKYLDDDGEWVLLTCDADLEECMDVYRTSQGHTIRMSVHPASHPHRNSLGSSGHTDKRFL

SEQ ID NO: 57 - protein, 926 aa, Eucalyptus grandis
MEDVAFTPNFTSESLLDSAMDLDLMDQLLLEGCWLETTDASNYPFRGIFQEEAGKDFAESPPSTCPRIEERLEMEQKNINPFEATASSSQSEGFQIEGTEVGRRCWIAPTANPGPSSSMKQRLMMVLGRLKECTKDKDVLVQIWVPVKKGGRNVLTTIDQPYVYNPNSKSLESYRNVSKTYQFLADEETKESVGLPGRVFLGKLPEWTPDVRFFSSEEYPRRDYAQQYDVRGSLALPVFERGSGTCLGVVEIITTSQKINYRPELETVCKALEAVDLRSSQTFRPPSAKACNQSHQAALPQILEVLTSVCRQYRLPLALTWASCLQQGKEGPRHSNENYEFCVSTVDSACFVADQHYLGFQEACSEHHLLRGQGIVGRAFTINQPCFAADITAFSRKEYPLAHHARMLGLCCATAIPLASIHTGSVDFVLEFFLPRDCRDAEEQKQMINSLSSFVCQTLQNSQKEQKETLVSSTRYTGVNTSDKRIQAEETDKLLPSLNKRHPQEVSWIANMVEAQKNSKGISVPFEVQKEPKEEFTVTTKWEETEIGLQHGQFHPEFHRVQQNLENKPNVEGGDTLGQFPSIGGRKSGQRTRTKTEKTISLDVLRQYFAGSLKDAARSIGVCPTTLKRICRQHGITRWPSRKIKKVGHSLKKLESIINSVQGAEGTIRIRSFYESFPELNSPRHSEKGTFSSANLGNPLEQLNPQTENGLFSSGATTSNSPSSSCSQSSGSTTSFSTGTKQCFTAITALSSGDPVMSNNPSEVLKRTRSDAELHISTHEEPKPLIRSQSHKSLDEWGSLENVATLPKTNSPRITRDLGIYRIKAILGEEKIRFSLKPSWGLRDLQREVANRFNIEDIGTIDLKYLDDDQEWVLLTCDADLEECIDVYRMSRNHTIRISIHQSSHQNLSSLGGSSGEAQHRGHIHL

SEQ ID NO: 58 - protein, 907 aa, Eucalyptus grandis
MEDGVLSPATMMGAPADSTMDLDFMDELFLDGCWLETTEGPGFPNQSPLSSGAIMDSSFFWPTSGTNGNFGMNPFQISNQAQTPLFNELQEEAPASMQSPNQNMTDVVGFSGQSENPIIQGHEFSRGIWIGPIENRISAPSVMERLKRALVYMKDVMRDKNVLVQVWLPVNRGGRRVLTTNDLLSSLDSSCPRLAKYHDISVNYQFSTGEDSKELVKGLPGRVFSAKVPEWTPDVRFFRNDEYPRVDDAQRYDVRGTLALPIFEQGSRTCLGVIEVVTTTQKVQYQPELESVCKALEAVDLRSSENLNTHNIKVNGKPYQAVLPEIREVLRSACETHNLPLAQTWVSCIQQAKDGCRHSDDNYVHCVSTVDQACHVTDPHIRGFHEACSEHHLLKGQGIVGRAFMTNQPCFSNDITSLAKTEYPLSHHARMFGLHAAVAIRLRSIDTGSTDFVLEFFLPVDCRDPEEHKKMLTSLSLIIQNICRSLRVVTDKELEEEIDLPVSEVIVPSDPRPSGIASFAEVQQTDNDVSIFPKEKARKMPSAKSSKLMPQDLNVKGVDCVGEFSTIVEGSFSSVGASKTGEKRRTKAEKAITLEVLRKYFSGSLKDAAKSLGVCSTTLKRICRQHGIKRWPSRKIKKVGHSLEKLQRVIDSVQGASSAFQINSFYTNYPELASPNLSGTSPFSTSKLIDRPRPSDVPPDGGVLSPQATASKSPSSSCSQSTSSSQCCSSKTEQHLPTWSVAGNDDPIVGDNRMLKRVRSEAELDALRQDGVDELMQRSQSHKNLSEQQKLQSFQPSLKYDGQIAQEGDARKVKVTYGDEKTRFRIQNNWKYEDLGQEIAKRFGINDMCRFDIKYLDDDSEWVLLTCDADLEECLDVCRSSRCSTIKLSLQLSRRQLERFSGSSGPA

SEQ ID NO: 59 - protein, 909 aa, Eucalyptus grandis
MGDGGVISSAATMMEAPPPDGTTTTSMDFDYMGELFLDGCWMEASADGSDFLLQSPSFSNTLFDPSFSWPALETNHNESQVAAFGSQQESHNNNMVSVVAGGDYSQQFQSETHSVEGASEGIRRWWFAPTHTPTPSPGPGPSIMEKLIRALMWIKDYNRNKDMLIQIWVPVHKEGRPILAADDLLFSLESKSLNLAKYREISVTYKFSAEESDSKELAWGLPGRVFRDKVPEWTPDVRFFKIDEYPRVDHAQEYDVRGTLAVPIFEQGSKTCLGVIEVVMTTQQINYGPELESVCKALEAVDLRSSKQLSIQNVKQACNRSYEAALPEIHEVLRSACEMHKLPLAQTWVPCVQQGKEGCRHSEDNYLLCISPVEHACYVGDPSIRSFHEACTEHHLLKGEGVAGGAFMTNQPCFSDDITSLSKKDYPMSHHARLFGLRAAVAIRLRSIYNSTDDFVLEFFLPVDCNDIEEQRKMLTSLSNIIQRVCRSLRVIREKELEEANLSVNEVIALADSGFTRDEICSEPQQKGMVASLDTEEKSSETMGRKFSEPRQQQESPILKGNLDCVRECSTSVEGNLSSPGTSKTGERRRVKAEKTITLQVLRQYFAGSLKDAAKNIGVCTTTLKRICRQHGIKRWPSRKIKKVGHSLQKLQLVIDSVQGASGAFQINSFYSNFPDLASPNLSGTGFFSTLNQSDNPNSTSTQPEHGSLSPEGASKSPSSSSSQSSISSHSCSSMSELQQQHTTNIASDKDPATVGEYSADVVLKLIRNEAKLKSLSQDRAKLLPRSLSQETLGEHPKTQYQLPLLKTSSSKVDSHRVKVTYGDEKTRFRMLKNWVYEDLLQEIGRKFNVSDMSKFDVKYLDDDCEWILLTCDADLEECIDVCQSSESGTIKLSLQPSSHSVRSSLEFR

SEQ ID NO: 60 - protein, 583 aa, Glycine max
MEYGGFGSLSECEEELIEELLVQGCWVETSGRSEEMPMGKTWWIGPKANHASVKERLEAAMGYLREYTNNNIQIWVPLRRSAGQELGTDESDTIAFERNRNVKLRLFRSQEGCVGVPVLERGSGTCLGVLEIVMEDEVVSEMMEVVRCVCKAQKVPLALAWAPCVQQKQAKTSSGRSLATAKPCFATDITAFSNAEYPLSHHASIFDLHAAVAIPLTTFSSSFHFVLEFFLPLDCPDHNHFLNSLSLLLHQACRSTFHLSLIHDHHLDFEFLPTESPSQASWIAHMMEAQSQHIKGVCLSLEEEPKEEFKVTTTHYCNWDSTATSTYQAHDQVVFGEESHTHTFGGKRGRKPGEKRRTKAEKTISLPVLRQYFAGSLKDAAKSIGVCPTTLKRICRQHGITRWPSRKIKKVGHSLKKLQLVIDSVQGAEGAIQIGSFYNSFPELSSQSSKSNNNNNSSSPTAAAAAAQSPQQPLRVKATFADEKIRFSLQPHWGFTELQLEIARRFNLNDVSNGYLVLKYLDDDGEWVVLACDGDLEECKDLHTTSQSRTIRLALFQASPLNNLPNTYTFAAATPSSSLAVSL

SEQ ID NO: 61 - protein, 710 aa, Glycine max
MEYGAFGSLSECEEDLIEELLEKGCWVETNGSSEAQYDIEQELAMPMGKTTWWIGPKGPVSGSSSSVKERLVVAVGYLREYTKNNNAANVLIQIWVPIRRMTGLLAIGLGPDESVSVAFPFPTNMNMNMKSNVNIRFFRSHEYPRIPYEYGSLALPVFERGSGTCLGVLQIVMPAARWDTINYLPQLDNNNNNNAFQGMIPGGVVKVFDEDEVYEASVNEMMEVVRCVCKTQNVPLALTWAPCVQQLCVDCGHSRDENNYVSIVDRACFVGDGQPQLLGFQEACSQHHLFRGQGIVGTAFTTAKPCFAMDITAFTKAEYPLSHHANIFDLHSAVAIPLRTSSYPHFDFVLEFFLPKHCPDHNLFLNSLSILLQQACPTFHLSAPIHDDVFTSLPSESQSQQASWIAHMIDAQSQHKDNGKGVCLSLDFLEEEPKEEFKVTTTHCNWDTTATSTYHSHDHVVFSDFGEESQSQSQSQTHTFGVKRGRKPGEKRRTKAEKTISLPVLRQYFAGSLKDAAKSIGVCPTTLKRICRQHGITRWPSRKIKKVGHSLKKLQLVIDSVQGAEGAIQIGSFYNSFPELSSRASQSSSPAAQSPPHVPQQPLRVKATFADEKIRFSLQPLWGFTELQLEISRRFNLSDVSNANNVVLKYLDDDGEWVVLACDGDLEECKDLHTTSQSRTIRLALFQASPLNNQPNSYTFANTTSTPSSS

SEQ ID NO: 62 - protein, 908 aa, Glycine max
MGDSGVTSSAATMMEAPPPDGTTTTATSMDFDYMGEFFLDGCWLEASADVSDFLLQSPSFSNPLFDPSLSWPALETNHNKSQDAAFGTQQESHNNIVSVVAGGGYSQQFQSETHSVEGVSEGVRRWWFAPSPIPSPGPGPSIMEKLIRALMWIKDYNRNKDMLIQIWVPIHKEGRPILAADDLLFSLESKSLNLAKYREISVTYEFSAEESDSKELARGLPGRVFRYKVPEWTPDVRFFRSDEYPRVDHAQEYDVRGTVAVPIFEQGSKTCLGVIEVVMTTQQINYGPELESVCKALEAVDLRSSKQLSIQNVKQACNRTYEAALPEIYEVLRSACEMHRLPLAQTWVPCVQQGKEGCRHSEDNYLLCISPVEHACYVGDPSIRSFHEACTEHHLLKGEGVAGGAFMTNQPCFSDDITSLSKKDYPLSHYARLFGLHAAVAIRLRSIYNSTDDFVLEFFLPVDCNDSEEQRKMLTALSIIIQRVCRSLRVIRDKELEEANLSVDEVIALADSGFARNAIFSEPQYKGMVASLDAEEKSSETMGRKFSDLRQQQESPILKGNLDCVKECSTSVEGNLSSLGTNKTGERRRAKAEKTITLQVLRQYFAGSLKDAAKNIGVCTTTLKRICRQHGIKRWPSRKIKKVGHSLQKLQLVINSVQGASGAFQIGSFYSNFPDLASPNLSGTGFFSTLNQSDYPNSTSTQPDHGSLSPEGASKSPSSSCSQSSISSHSCSSMSELQQHRTANGAGNKVSTTVSEDSAGVVLKRISSEAELKSLSQDRAKLLPRSQSQETLGEHPKTQYQQPLLKTSSSKVDSHRVKVAYGDEKTRFRMPKSWGYEDLLQEIARRFNVSDMSKFDVKYLDDDCEWVLLTCDADLEECIDVCQSSESGTIKLSLQPSSHSMRSSLEFR

SEQ ID NO: 63 - protein, 785 aa, Glycine max
MEYGGLVQNSAYGSFSEIFGPETDFIDELFVEGCWVETRVGSYLNCGGEANSSKPNTMASMETSAQIIFQEESLSDPEISLMVGKRWWIGPRENPGPSSSVKERLVIAVGYLKEYAKNSNLLIQVWVPERRRSARAQPQDNYPYAALLNTTSAFQFQEDWVHDQWTPNIRFFRSHEYPRHLRRPGSLALPVFESGSAMCLGVVEILMPNNPDLHALQSVDFTSSTCHQNFIPPAAVTAKGFDELYQSALNEIVEVLTCVCKAHNLPLALTWAPCIQQGKSGCGHSNDENYVSIVDPASFVADVEVLGFLEACSECHLLGGQGVVGTAFTTTKPCFANDITAFSKAEYPLAHHANMFGLHAAVAIPLLSDSADFVLEFFLPKDCHDTQEQKQMLNSLSMLVQQACRSLHVVMGKEEEEEEEEEELIALPPVGKEMESSSSSSWIAHMMEAQQKGKGVSVSLEYLQEPKQEFRVTTNCNEQVSVGVESGGGEESYTAAFGGRRGARKSAGDKRRTKAEKTISLPVLRQYFAGSLKDAAKSIGVCPTTLKRICRQHGITRWPSRKIKKVGHSLRKLQLVIDSVQGAEGAIQIGSFYTSFPELSSANGVSESSNINNKFFSEYNQGATTFKSPTSPCSQTTILISENQQPLVLGASIQVQEEAKHFAHHLEPLPPAPLPQSSTSLWNTAGTFRVKATFGDEKIRFSLQPNWGFRDLQMEIARRFNLNEISNIQLKYLDDAREWVLLTCDADLDECKDINTSSQSRTIRLFLFQASPLNHANAFRGTSPS

SEQ ID NO: 64 - protein, 910 aa, Glycine max
MMGDGGVISSAATMMEAPPPDGTTTTSMDFDYMGELFLDGCWMEASADGSDFLLQSPSFSNTLFDPSFSWPALETNHNESQVAAFGSQQESHNNNMVSVVAGGDYSQQFQSETHSVEGASEGIRRWWFAPTHTPTPSPGPGPSIMEKLIRALMWIKDYNRNKDMLIQIWVPVHKEGRPILAADDLLFSLESKSLNLAKYREISVTYKFSAEESDSKELAWGLPGRVFRDKVPEWTPDVRFFKIDEYPRVDHAQEYDVRGTLAVPIFEQGSKTCLGVIEVVMTTQQINYGPELESVCKALEAVDLRSSKQLSIQNVKQACNRSYEAALPEIHEVLRSACEMHKLPLAQTWVPCVQQGKEGCRHSEDNYLLCISPVEHACYVGDPSIRSFHEACTEHHLLKGEGVAGGAFMTNQPCFSDDITSLSKKDYPMSHHARLFGLRAAVAIRLRSIYNSTDDFVLEFFLPVDCNDIEEQRKMLTSLSNIIQRVCRSLRVIREKELEEANLSVNEVIALADSGFTRDEICSEPQQKGMVASLDTEEKSSETMGRKFSEPRQQQESPILKGNLDCVRECSTSVEGNLSSPGTSKTGERRRVKAEKTITLQVLRQYFAGSLKDAAKNIGVCTTTLKRICRQHGIKRWPSRKIKKVGHSLQKLQLVIDSVQGASGAFQINSFYSNFPDLASPNLSGTGFFSTLNQSDNPNSTSTQPEHGSLSPEGASKSPSSSSSQSSISSHSCSSMSELQQQHTTNIASDKDPATVGEYSADVVLKLIRNEAKLKSLSQDRAKLLPRSLSQETLGEHPKTQYQLPLLKTSSSKVDSHRVKVTYGDEKTRFRMLKNWVYEDLLQEIGRKFNVSDMSKFDVKYLDDDCEWILLTCDADLEECIDVCQSSESGTIKLSLQPSSHSVRSSLEFR

SEQ ID NO: 65 - protein, 792 aa, Glycine max
MEYGGLVQNAYGSYGSFSDILGPETDFIDELFVEGCWLETRVGSYLNCGTEANSSKSNTMRSMESTQIIFQQEESLPDPEISLMVGKRWWIGPRENPGPSSSVKERLVIAVGYLKEYAKNSNLPIQVWVPERRSARAQPQDNIYPYAAALLNGDAAAFQIQEDWVHVNDQYWTPNVRFFRSHEYPRHLRTPGSLALPVFERGTAMCLGVVEILMPNNPPDLQCTVDFTSSTSSHHHNFIPPAVTVKGFDELYQSALNGIVQVLTCVCKAHNLPLALTWAPCIQQAGKSGCGHSNDEMNYVSTVYAASFVADVELMGFLEACSECHLLGGQGVVGTAFTTTKPCFANDITSFSKAEYPLAHHANMFGLHAALGIPLRSASADFVLEFFLPKDCHDTQDQKQLLNSLFMLVQQACRSLHLVMEEEEELIALPSVVGKEMESSSWIAHMMEAQQKGKGVSVSLEYLQEPKQEFKVTTNCSNTNEQVSVGVESTAAFCGRRVGRKSAGDKRRTKAEKTISLPVLRQYFAGSLKDAAKSIGVCPTTLKRICRQHGITRWPSRKIKKVGHSLRKLQLVIDSVQGAEGAIQIGSFYTSFPELSSAANGVSESSNINNNNNDNSKFFSEYNQGQGATTFKSPTTSPCSQTTIVMSESQPLGLGASVQVVQEEAKHFAHQHLESLPPLPQSSTSVWNMGTFRVKATFGDEKIRFSLQPNWGFRDLQKEISRRFNLNEISNIQLKYLDDAREWVLLTCDADLEECKGINTSSQSQSRTIRLFLFHASPLNHANAFPGTSPSS

SEQ ID NO: 66 - protein, 909 aa, Glycine max
MMGDGGVISSAATMMEAPPPDGTTTTSMDFDYMGELFLDGCWMEASADGSDFLLQSPSFSNTLFDPSFSWPALETNHNESQVAAFGSQQESHNNNMVSVVAGGDYSQQFQSETHSVEGASEGIRRWWFAPTHTPTPSPGPGPSIMEKLIRALMWIKDYNRNKDMLIQIWVPVHKEGRPILAADDLLFSLESKSLNLAKYREISVTYKFSAEESDSKELAWGLPGRVFRDKVPEWTPDVRFFKIDEYPRVDHAQEYDVRGTLAVPIFEQGSKTCLGVIEVVMTTQQINYGPELESVCKALEAVDLRSSKQLSIQNVKACNRSYEAALPEIHEVLRSACEMHKLPLAQTWVPCVQQGKEGCRHSEDNYLLCISPVEHACYVGDPSIRSFHEACTEHHLLKGEGVAGGAFMTNQPCFSDDITSLSKKDYPMSHHARLFGLRAAVAIRLRSIYNSTDDFVLEFFLPVDCNDIEEQRKMLTSLSNIIQRVCRSLRVIREKELEEANLSVNEVIALADSGFTRDEICSEPQQKGMVASLDTEEKSSETMGRKFSEPRQQQESPILKGNLDCVRECSTSVEGNLSSPGTSKTGERRRVKAEKTITLQVLRQYFAGSLKDAAKNIGVCTTTLKRICRQHGIKRWPSRKIKKVGHSLQKLQLVIDSVQGASGAFQINSFYSNFPDLASPNLSGTGFFSTLNQSDNPNSTSTQPEHGSLSPEGASKSPSSSSSQSSISSHSCSSMSELQQQHTTNIASDKDPATVGEYSADVVLKLIRNEAKLKSLSQDRAKLLPRSLSQETLGEHPKTQYQLPLLKTSSSKVDSHRVKVTYGDEKTRFRMLKNWVYEDLLQEIGRKFNVSDMSKFDVKYLDDDCEWILLTCDADLEECIDVCQSSESGTIKLSLQPSSHSVRSSLEFR

SEQ ID NO: 67 - protein, 907 aa, Glycine max
MGDSGVTSSAATMMEAPPPDGTTTTATSMDFDYMGEFFLDGCWLEASADVSDFLLQSPSFSNPLFDPSLSWPALETNHNKSQDAAFGTQQESHNNIVSVVAGGGYSQQFQSETHSVEGVSEGVRRWWFAPSPIPSPGPGPSIMEKLIRALMWIKDYNRNKDMLIQIWVPIHKEGRPILAADDLLFSLESKSLNLAKYREISVTYEFSAEESDSKELARGLPGRVFRYKVPEWTPDVRFFRSDEYPRVDHAQEYDVRGTVAVPIFEQGSKTCLGVIEVVMTTQQINYGPELESVCKALEAVDLRSSKQLSIQNVKACNRTYEAALPEIYEVLRSACEMHRLPLAQTWVPCVQQGKEGCRHSEDNYLLCISPVEHACYVGDPSIRSFHEACTEHHLLKGEGVAGGAFMTNQPCFSDDITSLSKKDYPLSHYARLFGLHAAVAIRLRSIYNSTDDFVLEFFLPVDCNDSEEQRKMLTALSIIIQRVCRSLRVIRDKELEEANLSVDEVIALADSGFARNAIFSEPQYKGMVASLDAEEKSSETMGRKFSDLRQQQESPILKGNLDCVKECSTSVEGNLSSLGTNKTGERRRAKAEKTITLQVLRQYFAGSLKDAAKNIGVCTTTLKRICRQHGIKRWPSRKIKKVGHSLQKLQLVINSVQGASGAFQIGSFYSNFPDLASPNLSGTGFFSTLNQSDYPNSTSTQPDHGSLSPEGASKSPSSSCSQSSISSHSCSSMSELQQHRTANGAGNKVSTTVSEDSAGVVLKRISSEAELKSLSQDRAKLLPRSQSQETLGEHPKTQYQQPLLKTSSSKVDSHRVKVAYGDEKTRFRMPKSWGYEDLLQEIARRFNVSDMSKFDVKYLDDDCEWVLLTCDADLEECIDVCQSSESGTIKLSLQPSSHSMRSSLEFR

SEQ ID NO: 68 - protein, 581 aa, Glycine max
MEYGGLVQNAYGSYGSFSDILGPETDFIDELFVEGCWLETRVGSYLNCGTEANSSKSNTMRSMESTQIIFQQEESLPDPEISLMVGKRWWIGPRENPGPSSSVKERLVIAVGYLKEYAKNSNLPIQVWVPERRSARAQPQDNIYPYAAALLNGDAAAFQIQEDWVHVNDQYWTPNVRFFRSHEYPRHLRTPGSLALPVFERGTAMCLGVVEILMPNNPPDLQCTVDFTSSTSSHHHNFIPPAVTVKGFDELYQSALNGIVQVLTCVCKAHNLPLALTWAPCIQQAGKSGCGHSNDEMNYVSTVYAASFVADVELMGFLEACSECHLLGGQGVVGTAFTTTKPCFANDITSFSKAEYPLAHHANMFGLHAALGIPLRSASADFVLEFFLPKDCHDTQDQKQLLNSLFMLVQQACRSLHLVMEEEEELIALPSVVGKEMESSSWIAHMMEAQQKGKGVSVSLEYLQEPKQEFKVTTNCSNTNEQVSVGVESTAAFCGRRVGRKSAGDKRRTKAEKTISLPVLRQYFAGSLKDAAKSIGVCPTTLKRICRQHGITRWPSRKIKKVKELLHSNPQQLRLAVRPLL

SEQ ID NO: 69 - protein, 594 aa, Glycine max
MEYGGFGSLSECEEELIEELLVQGCWVETSGRSEEMPMGKTWWIGPKANHASVKERLEAAMGYLREYTNNNIQIWVPLRRSAGQELGTDESDTIAFERNRNVKLRLFRSQEGCVGVPVLERGSGTCLGVLEIVMEDEVVSEMMEVVRCVCKAQKVPLALAWAPCVQQKQAKYCGHSRDESYVTSSGRSLATAKPCFATDITAFSNAEYPLSHHASIFDLHAAVAIPLTTFSSSFHFVLEFFLPLDCPDHNHFLNSLSLLLHQACRSTFHLSLIHDHHLDFEFLPTESPSQASWIAHMMEAQSQHIKGVCLSLEEEPKEEFKVTTTHYCNWDSTATSTYQAHDQVVFGEESHTHTFGGKRGRKPGEKRRTKAEKTISLPVLRQYFAGSLKDAAKSIGVCPTTLKRICRQHGITRWPSRKIKKVGHSLKKLQLVIDSVQGAEGAIQIGSFYNSFPELSSQSSKSNNNNNSSSPTAAAAAAQSPQQPLRVKATFADEKIRFSLQPHWGFTELQLEIARRFNLNDVSNGYLVLKYLDDDGEWVVLACDGDLEECKDLHTTSQSRTIRLALFQASPLNNLPNTYTFAAATPSSSLAVSL

SEQ ID NO: 70 - protein, 709 aa, Glycine soja
MVGKRWWIGPRENPGPSSSVKERLVIAVGYLKEYAKNSNLPIQVWVPERRSARAQPQDNIYPYAAALLNGDAAAFQIQEDWVHVNDQYWTPNVRFFRSHEYPRHLRTPGSLALPVFERGTAMCLGVVEILMPNNPPDLQCTVDFTSSTSSHHHNFIPPAVTVKGFDELYQSALNGIVQVLTCVCKAHNLPLALTWAPCIQQAGKSGCGHSNDEMNYVSTVYAASFVADVELLGFLEACSECHLLGGQGVVGTAFTTTKPCFANDITSFSKAEYPLAHHANMFGLHAALGIPLRSASADFVLEFFLPKDCHDTQDQKQLLNSLFMLVQQACRSLHLVMEEEEELIALPSVVGKEMESSSWIAHMMEAQQKGKGVSVSLEYLQEPKQEFKVTTNCSNTNEQVSVGVESTAAFCGRRVGRKSAGDKRRTKAEKTISLPVLRQYFAGSLKDAAKSIGVCPTTLKRICRQHGITRWPSRKIKKVGHSLRKLQLVIDSVQGAEGAIQIGSFYTSFPELSSAANGVSESSNINNNNNDNSKFFSEYNQGQGATTFKSPTTSPCSQTTIVMSESQPLGLGASVQVVQEEAKHLAHQHLESLPPLPQSSTSVWNMGTFRVKATFGDEKIRFSLQPNWGFRDLQKEISRRFNLNEISNIQLKYLDDAREWVLLTCDADLEECKGINTSSQSQSRTIRLFLFHASPLNHANAFPGTSPSS

SEQ ID NO: 71 - protein, 910 aa, Glycine soja
MMGDGGVTSSAATMMEAPPPDGTTTTSMDFDYMGELFLDGCWMEASADGSDFLLQSPSFSNTLFDPSFSWPALETNHNESQVAAFGSQQESHNNNMVSVVAGGDYSQQFQSETHSVEGASEGIRRWWFAPTHTPTPSPGPGPSIMEKLIRALMWIKDYNRNKDMLIQIWVPVHKEGRPILAADDLLFSLESKSLNLAKYREISVTYKFSAEESDSKELAWGLPGRVFRDKVPEWTPDVRFFKIDEYPRVDHAQEYDVRGTLAVPIFEQGSKTCLGVIEVVMTTQQINYGPELESVCKALEAVDLRSSKQLSIQNVKQACNRSYEAALPEIHEVLRSACEMHKLPLAQTWVPCVQQGKEGCRHSEDNYLLCISPVEHACYVGDPSIRSFHEACTEHHLLKGEGVAGGAFMTNQPCFSDDITSLSKKDYPMSHHARLFGLRAAVAIRLRSIYNSTDDFVLEFFLPIDCNDIEEQRKMLTSLSNIIQRVCRSLRVIREKELEEANLSVNEVIALADSGFTRDEICSEPQQKGMVASLDTEEKSRETMGRKFSEPRQQQESPILKGNLDCVRECSTSVEGNLSSPGTSKTGERRRVKAEKTITLQVLRQYFAGSLKDAAKNIGVCTTTLKRICRQHGIKRWPSRKIKKVGHSLQKLQLVIDSVQGASGAFQIDSFYSNFPDLASPNLSGTGFFSTLNQSDNPNSTSTQPEHGSLSPEGASKSPSSSSSQSSISSHSCSSMSELQQQHTTNIASDKDPATVGEDSADVVLKLIRNEAKLKSLSQDRAKLLPRSLSQETLGEHPKTQYQLPLLKTSSSKVDSHRVKVTYGDEKTRFRMLKNWVYEDLLQEIGRKFNVSDMSKFDVKYLDDDCEWILLTCDADLEECIDVCQSSESGTIKLSLQPSSHSVRSSLEFR

SEQ ID NO: 72 - protein, 666 aa, Glycine soja
MPMGKTTWWIGPKGPVSGSSSSVKERLVVAVGYLREYTKNNNAANVLIQIWVPIRRMTGLLAIGLGPDESVSVAFPFPTNMNMNMKSNVNIRFFRSHEYPRIPYEYGSLALPVFERGSGTCLGVLQIVMPAARWDTINYLPQLDNNNNNNAFQGMIPGGVVKVFDEDEVYEASVNEMMEVVRCVCKTQNVPLALTWAPCVQQLCVDCGHSRDENNYVSIVDRACFVGDGQPQLLGFQEACSQHHLFRGQGIVGTAFTTAKPCFAMDITAFTKAEYPLSHHANIFDLHSAVAIPLRTSSYPHFDFVLEFFLPKHCPDHNLFLNSLSILLQQACPTFHLSAPIHDDVFTSLPSESQSQQASWIAHMIDAQSQHKDNGKGVCLSLDFLEEEPKEEFKVTTTHCNWDTTATSTYHSHDHVVFSDFGEESQSQSQSQTHTFGVKRGRKPGEKRRTKAEKTISLPVLRQYFAGSLKDAAKSIGVCPTTLKRICRQHGITRWPSRKIKKVGHSLKKLQLVIDSVQGAEGAIQIGSFYNSFPELSSRASQSSSPAAQSPPHVPQQPLRVKATFADEKIRFSLQPLWGFTELQLEISRRFNLSDVSNANNVVLKYLDDDGEWVVLACDGDLEECKDLHTTSQSRTIRLALFQASPLNNQPNSYTFANTTSTPSSS

SEQ ID NO: 73 - protein, 704 aa, Glycine soja
MVGKRWWIGPRENPGPSSSVKERLVIAVGYLKEYAKNSNLLIQVWVPERRRSARAQPQDNYPYAALLNTTSAFQFQEDWVHDQWTPNIRFFRSHEYPRHLRRPGSLALPVFESGSAMCLGVVEILMPNNPDLHALQSVDFTSSTCHQNFIPPAAVTAKGFDELYQSALNEIVEVLTCVCKAHNLPLALTWAPCIQQGKSGCGHSNDENYVSMVDPASFVADVEVLGFLEACSECHLLGGQGVVGTAFTTTKPCFANDITAFSKAEYPLAHHANMFGLHAAVAIPLLSDSADFVLEFFLPKDCHDTQEQKQMLNSLSMLVQQACRSLHVVMGKEEEEEEEEEELIALPPVGKEMESSSSSSWIAHMMEAQQKGKGVSVSLEYLQEPKQEFRVTTNCNEQVSVGVESGGGEESYTAAFGGRRGARKSAGDKRRTKAEKTISLPVLRQYFAGSLKDAAKSIGVCPTTLKRICRQHGITRWPSRKIKKVGHSLRKLQLVIDSVQGAEGAIQIGSFYTSFPELSSANGVSESSNINNKFFSEYNQGATTFKSPTSPCSQTTILISENQQPLVLGASIQVQEEAKHFAHHLEPLPPAPLPQSSTSLWNTAGTFRVKATFGDEKIRFSLQPNWGFRDLQMEIARRFNLNEISNIQLKYLDDAREWVLLTCDADLDECKDINTSSQSRTIRLFLFQASPLNHANAFRGTSPS

SEQ ID NO: 74 - protein, 874 aa, Glycine soja
MGEFFLDGCWLEASADVSDFLLQSPSFSNPLFDPSLSWPALETNHNKSQDAAFGTQQESHNNIVSVVAGGGYSQQFQSETHSVEGVSEGVRRWWFAPSPIPSPGPGPSIMEKLIRALMWIKDYNRNKDMLIQIWVPIHKEGRPILAADDLLFSLESKSLNLAKYREISVTYEFSAEESDSKELARGLPGRVFRYKVPEWTPDVRFFRSDEYPRVDHAQEYDVRGTVAVPIFEQGSKTCLGVIEVVMTTQQINYGPELESVCKALEAVDLRSSKQLSIQNVKACNRTYEAALPEIYEVLRSACEMHRLPLAQTWVPCVQQGKEGCRHSEDNYLLCISPVEHACYVGDPSIRSFHEACTEHHLLKGEGVAGGAFMTNQPCFSDDITSLSKKDYPLSHYARLFGLHAAVAIRLRSIYNSTDDFVLEFFLPVDCNDSEEQRKMLTALSIIIQRVCRSLRVIRDKELEEANLSVDEVIALADSGFARNAIFSEPQYKGMVASLDAEEKSSETMGRKFSDLRQQQESPILKGNLDCVKECSTSVEGNLSSLGTNKTGERRRAKAEKTITLQVLRQYFAGSLKDAAKNIGVCTTTLKRICRQHGIKRWPSRKIKKVGHSLQKLQLVINSVQGASGAFQIGSFYSNFPDLASPNLSGTGFFSTLNQSDYPNSTSTQPDHGSLSPEGASKSPSSSCSQSSISSHSCSSMSELQQHRTANGAGNKVSTTVSEDSAGVVLKRISSEAELKSLSQDRAKLLPRSQSQETLGEHPKTQYQQPLLKTSSSKVDSHRVKVAYGDEKTRFRMPKSWGYEDLLQEIARRFNVSDMSKFDVKYLDDDCEWVLLTCDADLEECIDVCQSSESGTIKLSLQPSSHSMRSSLEFR

SEQ ID NO: 75 - protein, 591 aa, Glycine soja
MPMGKTWWIGPKANHASVKERLEAAMGYLREYTNNNIQIWVPLRRSAGQELGTDESDTIAFERNRNVKLRLFRSQEGCVGVPVLERGSGTCLGVLEIVMEDEVVSEMMEVVRCVCKAQKVPLALAWAPCVQQKQAKYCGHSRDESYVSTVERACFVGEENPQLLGFQEACSQHHLFRGQGVVGTALATAKPCFATDITAFSNAEYPLSHHASIFDLHAAVAIPLTTFSSSFHFVLEFFLPLDCPDHNHFLNSLSLLLHQACRSTFHLSLIHDHHLDFEFLPTESPSQASWIAHMMEAQSQHIKGVCLSLEEEPKEEFKVTTTHYCNWDSTATSTYQAHDQVVFGEESHTHTFGGKRGRKPGEKRRTKAEKTISLPVLRQYFAGSLKDAAKSIGVCPTTLKRICRQHGITRWPSRKIKKVGHSLKKLQLVIDSVQGAEGAIQIGSFYNSFPELSSQSSKSNNNNNSSSPTAAAAAAQSPQQPLRVKATFADEKIRFSLQPHWGFTELQLEIARRFNLNDVSNGYLVLKYLDDDGEWVVLACDGDLEECKDLHTTSQSRTIRLALFQASPLNNLPNTYTFAAATPSSSLAVSL

SEQ ID NO: 76 - protein, 841 aa, Hordeum vulgare
  subsp. vulgare
MEGGDAQPGISVGRALSSEGDLDLLEQLLSGDNAWLEVAPNTSRSPNFFASPSTFLSDATTTTTMPAGASSALWIQPPSSTVRQRFEQALDHIKQMQRDAGMLVQLWVPQKNSDGKLVLTTSGQPFTLDNTSDRLIQFRDVSTHYHFSADAGSEASPVGLPGRVFIGKLPEWSPDVRLFTSYEYPRVKYAQDLDVHGTMGLPVFEKGSYSCLGVMELIMTRQKLNFTSEINNICNALQAVNLRSTEVSSTPRATKFNSASYRDALPEILEVLRAACVTHNLPLAQTWVTCAQQGKGGSRHTDENYPYCISTIDTACYVNDPQMQNFHDSCSDHHLLRGQGVAGKAFETNQPCFLPDIGSSAKEHYPLSHHAKIFNLKGAVAIRLRCTRTGTADFVLEFFLPTNCEALEEQKAVLDSLSGTMRNTCRTLRVVTDKEMGDEAMLDRNELNTFGPQGKNKVEELSFGDQATEHREEASWTSLAGTSKESDLAELSMHGMLSPEGQGLSLAGAQTSAQGSKGKRRTKTEKTVSLPVLRQYFAGSLKDAARSLGVCPTTLKRICRQHGINRWPSRKIKKVDHSLRKLQQIIDSVHGGETAFQLNTLYKDLTNTSVSSDNNLSGSITVPPHKQSNLTDFERHGHHRLSNNVPSTSHSHSSCSQSSDSSPSSCSGGSTKYPPQAGVDLLMSGNPVNHSPVQTLQTENASIIGHFPVQEAPDLLHNLNQKALGGQHSSRSPSPPKQNADTGMRIKAAFGSEKVRFRLKPECSFQELKQEMARRLSIVDISFLIVKYLDDDLEWVLMTCDADLQECLHVYKLANLQTVKISVHLAPIPEARVTVGRTGLS

SEQ ID NO: 77 - protein, 503 aa, Hordeum vulgare
  subsp. vulgare
MERRTASPEGADIYLMDLDTVQLLLPPDDGDGDSGSPELAIEASSSYPCIDQDLDQHLANYSLVLPSTPELAIDGSSSPIIDWAALDKIPLYIGSCLEVATTIIPSDAETTMASEGAMSGSDLNEPLHRDNTCLQAATIASSPYASPRTIPSDATTNHVFPRGYFAQKEGEAARLNLDSLVIKLSSMMERELKSFCSKIQDTIQHVVESTMKTYFLQKKKRTITHVSSIPRTKFNINSYEEAIREILQVLRAACVIHNLPLAQTWATCAQQGKQCKHHSYENCRYCISTIDAACYVNDPRIQIFHEACSEHHLLPGQGVAGKAFATNQSCFRPDVGSSTEQEYPLSHHAKIFKLKGVMAIRLRSTRTGTADFVLEFFLPTDCEVENEQNALMNSLSKTVQCLCPTLRMVTNKEMEDDPVWEMNEINSLGLQKNNKVKKRKSMARRSPVWKSFTEVMDGDTVKAKCNHCGIDLCCDSKTHGTSSLANHLKICKLNPNNRITGPM

SEQ ID NO: 78 - protein, 637 aa, Humulus lupulus
MPTFKAVVDLRSSQNFSPPSVCDELYQAVLTEIVEVLVSVCKTHRIPLAQTWAPCHQQGHAGENYARCVSSASLVSDLELLGFHEACSQHHLFRGQGIVGAAFTTNKPCFATDTTSFDKTEYPLSHHARMFGLRAAVAIPLRSISAGSFFDFVLELFLPKDCQDPEEQKQISNSLSFVIQQACDCKSLRVIVEKELEEDRVMLPTGDQTVVSTPEVQSSGKESSWVDHMMEAQQQGRGVSASLDYLTEEPDEEFRVTPHGVNLNHGDLPKGKVSTDFGQLQKCSGSKESSNGGADSHSFDCHSSSGARKAGEKRTRSTENISLPVLRQYFAGSLKDAAKSIGVCPTTLKRICRQHGITRWPSRKIKKVGHSLMKLQLMIDSVEGADGAIQIGSFYSSIPQLNSPKFPGNNNDSSSSVNPSKQQYNQHLNSQSNSQLESGIYNHGLAMKPPSSMSSQASALHQHKTTTFDGFNGDSLITEDTSVILNGSCSSDRELLASSREENQIMDQTLPPLPENNVGIDSRNKSAFRVKVNFGDKKIRFSLIANSSFRELQLEIMKRFNLDDIAMIDIKYLDDDRDWILLTCNADLQECFELHSQSLNHKMRLCLQQTSSEQRIEASHFESSSSSHASGNHYRPV

SEQ ID NO: 79 - protein, 924 aa, Humulus lupulus
MEEGVLSPATMLGAQSEYPMDLDFMDELFLEGCWLETRDVSEYLNQTPSSNPLFDPLFWPTLETTGDLNANPSQKNNQEERQKLLFNETLGASIFRALPPSQTINNVANNSGVSEAFITEDDEMRRTSWTGAKETQGPSSCVIEKLCRALMYIKDVIRDNDILVQIWVPVDREGRRVLTTRDLPFALDDSCPKLAQYRDISVEFHFPAEEDSKGSIMGLPGRVFSGKVPEWTPDVRYFRKDEYPRLKHAHQFDVRGTLALPIFEQGSRICLGVVEIIMTTQKIKYRPELESICKALEAVNLKSSEVLSTQNVRVFNKYYQAALPEIQQVLKSACDTHRLPLAQTWVPCIYQAKEGCRHSDENYVQCVSTVDHACYVADPHVQGFHEACSEHHLFRGQGVVGGAFMTNQPCFSADITSYPKTEYPLSHHAMMFELHAAVAIRLRSTHTGTADFVLEFFLPKDCIDPEEQKKMLTSLSLIIQQCCRTLRVVTDKEIDDERDFQVSEVLVPSNDRPDRVICFQEVQQNDNDLSLFPVEKPREISDRRHSKLSQNQRDSSLKPSDECVEECSTVGEGTFSSLGGGKTGERRRTKAEKTITLQVLRQYFAGSLKDAAKSIGVCSTTLKRICRQHGIKRWPSRKIKKVGHSLQKLQLVIDSVQGASGAFQIDSFYSNFPELASPNVSGTSPFSTSKANDHPTPSSLQQPAEGSGGMFSAQATTTAAAATSKSSSTYSQSSSSSQCCSSRSQQHPQTWSNMVTSSEDANGGENSGDDVVLKRVRSEAELNACHEVVNKQLPRSQSHISLMEHRKSLKSGFPPSSLKNERRLPQQEGELQRVKVTYGEEKTRFRIPSNWGFMDLQQEVGRRFGIQDMATFTLKYLDDDSEWVLLTCDADLEECFEVWPASQNSTIKLSLQLSRGFIGGNDPL

SEQ ID NO: 80 - protein, 608 aa, Jatropha curcas
MSYEAALSEIHEVLRSACETHKLPLGQIWVPCIQQGKRGCRHSDENYYRCVSTVDHACYVRETGMQAFHEACSEHHLLKGQGVAGEAFLTNQPCFSSDITSYRKTEYPLSHHARMFGLHAAVAIRLRSVHTGKADFALEFFLPVDCTDPEKQKDMLTSLSTIIQQVCQSLRVVTDRELEAETGPVSEVVLPSYGRPRREDMLRVMHYSESYAGDNSSLTASLTGIQQSGSVVLSYEKENQKVPIDEKSMEYRISREDYNLKRSIECGVDSEVAEGSLSSVCMGKTAERKRSKAEKAITLQVLRQYFAGSLKDAAKSIGVCPTTLKRICRQHGIKRWPSRKIKKVGHSLQKLQLVIDSVQGASGALQIGSFYTNFPELASQKLSSSPFSASKQSDHLEQSSIQTDGGTFSSQVAAPKSPSSSCSQSSSSSHSCSSGLQQNPSVFSIPTSEDHIPGENSSNGVLKRVRSDAELHASSQEEQNMLPRSQSHIPLREQPNSGNLPPLPKSSSRISHEGDAQRIKVTYGNEKIRFRMPYNWKRKDLLQEIARRFFIDDINRYDLKYLDDDNEWVLLTCDDDLEECIDVCQSSENSTIKLSLQISHLMDGFSRS

SEQ ID NO: 81 - protein, 800 aa, Jatropha curcas
MDLDFIDKPFAHGSWLRTTDKVNFLESDPFISSVQYLDSYHQFSQKEMENLFDNPTPVYPGIGKCVVETDTCLGQSQGGESRTRKCLIEPYCSVKDRLMLAIDYLKEYVEDSDALIQIWVPTKIAGQNVLTTTDQPYSLNPSCLSLASYRNVSKAFHLTAEEDSKESAGLPGPVFLEKFPEWTPDVRFFRNDECPRKYYAELYNISGCLALPVFEQESGTCLAVVEIVTTTQKINYHLELEIVCKALEAVDLKSSQDFFPFCIKTCNEFYQIAIPEISKILKSVCETNNLPLALTWALCNRQGKNEYKQVSGKYDYYISTVDSACYMADSDLFGFYKACSTQYLFLDQGIVGKALTRNKQLFATDVTSFSKTSYPLSHHARMFNLRAALAIPLANIYTGSIEFVLEIFLPRDCQDIEEQKHMWDFLPIVIQHSCRNFHVIMDKEKENFAFVSWECLKEEPEEAFKVISHWDNNESEFSEFEQLQESSALKFGVTDESKENSSVGEKRQTKAEKTISLQILRQYFAGSLKDAAKSIGVCPTTLKRICRQHGINRWPSRKIKKGNHSLKKLQLVVNSIRGAEGLIRIDSFYNTFPGLNSQGNDHFPSFKTNNNSQKLNSQPDSGLLSLKVADSNSQSPSGSQNSGSSICCSTKAKQLTSTTTNGLNTAFSLAVEVPVVTLNRSCSKAELLSPNHDKIQETIPKVTGQSFRDGMIFRVKATFGLENIRFSFQPNWAFKDLQQEIAKRFKIYDFSKIDLKYLDIDQESVLLTCDDDLDECLDLLRFSQTNTLKISLYQSSQPKI

SEQ ID NO: 82 - protein, 946 aa, Jatropha curcas
MDDGAFNPNSRPRTFSGTAMDLDFIDELLDDGCWLETTDGFNFLQPGLSNSGVPSDPSQYSPYLESSSSLASTNLHQVIHQEAAENNLPGNPPCNNTRGKELTESESQNQSSLKITSSLVQPEPSPIEGSELGTRLWIAPMAGVQSSSSVKQRLIHAIGKLKECAKDMEVLVQIWVPTKKEGKCVLTTIGQPSFHSLKNESLASYRNVSEAYNFPVEGDSKESLGLPGRVFLGKLPESTPDVRFFRSDEYPRKSYAKQYNIRGSLAVPVLERGTGNCLGVVEVITTSQYINYRPELETICKALEAVDLRSSQHFCPPSVKACKEFCQAAVPEISEILGSVCKTHKLPLALTWARCFQQGKGGCRHFDENFAHSISTVDSACFVADTEFLAFHAACSEQYLFLGQGIVGKAFMMNKQCFATDITSFSKTDYPLSHHAKVLDLHAAVAIPLRSTYAGSADFVLELFLPKDCRDGEEQKRIWDLLPIAIQQSCKSLHVVMDKEQEEDIRWQMAVNSNGRYNKQENHNFASSSLQQHYPESSSWITQMMEAQQKGKSVCVSWDTENKPKQEFKVATNYDDTPEDLYSKQVFAESGQLHQNSGNKNSIEVSKNSSFAGQHSSGSKKGGEKRRTKAEKTISLQVLRQYFAGSLKDAAKSIGVCPTTLKRICRQHGITRWPSRKLKKVGHSLKKLQLVIDSVQGAEGTIQIDSFYSTFPELTSPNFRENGPSASLKTNDNLKPLNPWPDSGLSNGGVTASKSPSSSCSRSSGSSICCSTGEKKHKIPDNVVNTGDAIAVEDPSSILKRTRSDAELHALYREEEHKPLARSQSHKILGDHHPSLTESLPPFPKSSCKSFRDSGAFRVKANFGEDKVRFSLQPSWSFKDLQQELAKRFNRNDICRTDLKYLDDDQEWVLLTCDDDLEECKDIYRLSQGQSQTIKISVNQASQHLQ

SEQ ID NO: 83 - protein, 924 aa, Jatropha curcas
MEDSILSPGTMLAAHADSAMDFDDMDELLLDGCWLETIDGSEFFNPSPHNCAPLIDSSFLWPTSENNDGDLVSRPSQKSNQQDERMSMLPRNSPLNESQSSSPVITQTIGQDMSSVARWGNDADEGSEVSRRWWIGPKAKTPVRDRLIRALGYINDFSKDKDVLIQIWVPVNEGGRRVLTTQDQHFALVPNCQRLANYRDISVNYQFSTEKDSKDMMGLPGRVFLGKVPEWTPDVRFFRSDEYPRVGHAQLYDVCGTLALPVFEQGTRTCLGVIEVVTTAQKIKYRPELETVCKALEAVDLQSSEVPIGQNVKVCDMSYEAALSEIHEVLRSACETHKLPLGQIWVPCIQQGKRGCRHSDENYYRCVSTVDHACYVRETGMQAFHEACSEHHLLKGQGVAGEAFLTNQPCFSSDITSYRKTEYPLSHHARMFGLHAAVAIRLRSVHTGKADFALEFFLPVDCTDPEKQKDMLTSLSTIIQQVCQSLRVVTDRELEAETGPVSEVVLPSYGRPRREDMLRVMHYSESYAGDNSSLTASLTGIQQSGSVVLSYEKENQKVPIDEKSMEYRISREDYNLKRSIECGVDSEVAEGSLSSVCMGKTAERKRSKAEKAITLQVLRQYFAGSLKDAAKSIGVCPTTLKRICRQHGIKRWPSRKIKKVGHSLQKLQLVIDSVQGASGALQIGSFYTNFPELASQKLSSSPFSASKQSDHLEQSSIQTDGGTFSSQVAAPKSPSSSCSQSSSSSHSCSSGLQQNPSVFSIPTSEDHIPGENSSNGVLKRVRSDAELHASSQEEQNMLPRSQSHIPLREQPNSGNLPPLPKSSSRISHEGDAQRIKVTYGNEKIRFRMPYNWKRKDLLQEIARRFFIDDINRYDLKYLDDDNEWVLLTCDDDLEECIDVCQSSENSTIKLSLQISHLMDGFSRS

SEQ ID NO: 84 - protein, 529 aa, Jatropha curcas
MDRGASALINSTFSSTSMDLDFIDKPFAHGSWLRTTDKVNFLESDPFISSVQYLDSYHQFSQKEMENLFDNPTPVYPGIGKCVVETDTCLGQSQGGESRTRKCLIEPYCSVKDRLMLAIDYLKEYVEDSDALIQIWVPTKIAGQNVLTTTDQPYSLNPSCLSLASYRNVSKAFHLTAEEDSKESAGLPGPVFLEKFPEWTPDVRFFRNDECPRKYYAELYNISGCLALPVFEQESGTCLAVVEIVTTTQKINYHLELEIVCKALEAVDLKSSQDFFPFCIKTCNEFYQIAIPEISKILKSVCETNNLPLALTWALCNRQGKNEYKQVSGKYDYYISTVDSACYMADSDLFGFYKACSTQYLFLDQGIVGKALTRNKQLFATDVTSFSKTSYPLSHHARMFNLRAALAIPLANIYTGSIEFVLEIFLPRDCQDIEEQKHMWDFLPIVIQHSCRNFHVIMDKEKENFAFVSWECLKEEPEEAFKVISHWDNNESEFSEFEQLQESSALKFGVTDESKENSSVGIDFSLSKN

SEQ ID NO: 85 - protein, 875 aa, Juglans regia
MEDGVSSPGTMLGARADLAMDLDFMDDLLFDGCWLEAMDGSEFVHQNPSTSGAQLDPSLEWPDLKANDNLKSNPSQIGNEEEIQRPLPDESQERSLVSAASLGQDMINVARCSSESKNNVIEGSELRTRWWIAPSGNPGCTTSVTQRLINAIGYLREFTRDKGVLIQIWVPVNSGNGRVLTTSNQPFSLDSSCPRLARYRDISRKFQFSAEEDSRELVGLPGRVFLDKVPEWTPDVRFFRSDEYPRVGHAQQYNICGTLALPIFEQGSRTCFGVIEVVMTTQQIKYFPEVESVRKALEAVDLRSSDALSTNNVKACNMAYLAALPEIKEVLRSACETHGLPLAQTWVPCIQQGKAGCRHSDDNYVNCVSTVDHACVVADPNMLGFHEACSEHHLLKGQGIVGGAFRTNQPCFSADITSFGKTEYPLSHHARVFGLCAAVAIHLRSIHTGTADFVLEFFLPVNCTDSVEQKKMLSSLSIIVQHVCRSLRIVTDKELEEDTNLPVNDDKPSRDQEMLHDEKSAELWQRRQDSKLERNIEFGEECSTYDEGIFPSVGMSKAGEKRRSRVEKTITLEVLRQYFSGSLKDAAKSIGVCSTTLKRICRQKGIKRWPSRQIKKVGHSLQKLQLVIDSVHGASGAIQINSFYTNFPELTSPKLSGTSPLSARKLSEYTQPSSSMQPEGELFSPQAVPKSTSSSCSQASTSSHSCSSGTHQHPPTRNIARVEDAIIGENRHQGVLSRIGSGAEIQDPSQGPKLLPKSQSHQSLNAENLVPSLKDSGHVSQEWYAQKVKVTYGDEKVRFRVQNNWKYTDLLLEIARRFYIDDMSRFNLKYLDDDAEWILLTCDADWEECIDVWQSSQSHTIKLSLQVSRHQLGSL

SEQ ID NO: 86 - protein, 871 aa, Juglans regia
MEDGVLSPGTMLDALPDSGMDLDFMDNIFFDGFWLEATDGSEFLHHSPSSSGALLVPSFEWPALEANGNLRANPSQKDNESKERSLVNAISLEQNMINVAGWSRESENNVIEGSERSTRWWIAPSGNPGCTISVAQRLIKAVEYLRELTRNKDVLIQIWVPVNRGGRRVLTTSDQPYSLYSSCPRLARYRDISGKFHFSAEEDSKESVGLPGRVFLGKVPEWTPDVRFFRSDEYPRVGHAQEFNICGTLALPIFEQGSRTCLGVIEVVMTTQQIKIRPELESVREALEAVDLRGSDALSTDNVKQACNTAYQAALPEIQEVLRSACETHRLPLAQTWVPCIQQGKEGCRHSDDNYVDCVSTVDHACIVADPNMLGFHEACSEHHLLKGQGIVGGAFRTNQPCFSTDITSFSKTEYPLSHHARVFGLHAAVAIHLRSIHTGTADFVLEFFLPVNCTDPEEQKNMLSSLSIIIQQVCQSLRVVTDKELQEDTYLPVNGKPSTEDMLHEKSREFWPCQPDSSLKRNVEFGEECSAYDEGSFPSMGMGMGMGKAGEKRRTKAEKNITLEVLRQYFAGSLKDAAKSIGVCPTTLKRICRQHGIKRWPSRKIKKVGHSLQKLQLVIDSVQGASGAFQINPLYTNFTELGSPKLSGTCSFTASKLSDHLQPSSIKAEGEFFSPEAVASKSPSSCSQTSTSSQCCSSGAQQHPLMCNVGGCEVVGENHGDGVLKRISSEAEIQATNQGPKLLSRSQSHKSLNAKNLTSSRKNSARVFQEGFAQKVKVTYGEEKVRFRMQNNWSYADLLLEIARRYNIEDMSRFYIKYLDDDAEWILLTCDADLEECIDVCQSSHSHTIKLSLQVSHHNLGKSLGISGPS

SEQ ID NO: 87 - protein, 870 aa, Juglans regia
MEDGVLSPGTMLDALPDSGMDLDFMDNIFFDGFWLEATDGSEFLHHSPSSSGALLVPSFEWPALEANGNLRANPSQKDNESKERSLVNAISLEQNMINVAGWSRESENNVIEGSERSTRWWIAPSGNPGCTISVAQRLIKAVEYLRELTRNKDVLIQIWVPVNRGGRRVLTTSDQPYSLYSSCPRLARYRDISGKFHFSAEEDSKESVGLPGRVFLGKVPEWTPDVRFFRSDEYPRVGHAQEFNICGTLALPIFEQGSRTCLGVIEVVMTTQQIKIRPELESVREALEAVDLRGSDALSTDNVKACNTAYQAALPEIQEVLRSACETHRLPLAQTWVPCIQQGKEGCRHSDDNYVDCVSTVDHACIVADPNMLGFHEACSEHHLLKGQGIVGGAFRTNQPCFSTDITSFSKTEYPLSHHARVFGLHAAVAIHLRSIHTGTADFVLEFFLPVNCTDPEEQKNMLSSLSIIIQQVCQSLRVVTDKELQEDTYLPVNGKPSTEDMLHEKSREFWPCQPDSSLKRNVEFGEECSAYDEGSFPSMGMGMGMGKAGEKRRTKAEKNITLEVLRQYFAGSLKDAAKSIGVCPTTLKRICRQHGIKRWPSRKIKKVGHSLQKLQLVIDSVQGASGAFQINPLYTNFTELGSPKLSGTCSFTASKLSDHLQPSSIKAEGEFFSPEAVASKSPSSCSQTSTSSQCCSSGAQQHPLMCNVGGCEVVGENHGDGVLKRISSEAEIQATNQGPKLLSRSQSHKSLNAKNLTSSRKNSARVFQEGFAQKVKVTYGEEKVRFRMQNNWSYADLLLEIARRYNIEDMSRFYIKYLDDDAEWILLTCDADLEECIDVCQSSHSHTIKLSLQVSHHNLGKSLGISGPS

SEQ ID NO: 88 - protein, 944 aa, Juglans regia
MEIEREFNMEYGAFTSNSTTYGNFSENNMISNTELGFMDELLIEGCWLETTGLGLNLFPPGPLPASAQAFNHEYRPSHHYLPPLEINSISHLSINQYYSQQIYQESTEGTFPESEGILVEGTELGMIRRWWIGPSWANPGPCSSVKERLMMAVGYLTECTKNMNVLIQIWVPISWRSSGGRYNFLTTQDQPYSFGANCKSLANYRDVSRAYDHEFAVEEDIDQVFWEQLPEYWTPDIVRFFKRDEYPHDIINYAHDEQYSRGVRGFLALPVFERGSGTCLGVVEIVTTADQNINVHRPELENVICQALDQANVDLRSYQSFSPPSVKAYNYDELYQVALAEIVEVLATVCKTHRLPLALTWAPCLQQGKGGCRHSDENYAHCLSTVDTACFVSDAEVLGFHEACSEYHLFRGQGTVGTAFTTTKPCFATDMSAFSKIEYPLSHHARMFGLRAAVAIPFRSLYTGSADFVLEFFLPKDCHDTEEQNQMLNSLSIVLQQACRSLHAVIEKVVLDEDEVIYSVEEVVIASDDVRIKKEEPQKSVSSPLKEACSKESSWIAHMKEVQQKGKGVSISLEYQEEDPKEEFKVTTHWDNTQGASLNGQGLSEFGQLQQSSGSKGSVDGGGGSYSYGGRRSSSGRKTGEKRRTKTQKTISLSVLRQYFAGSLKDAAKSIGVCPTTLKRICRQHGITRWPSRKIKKVGHSLRKLQSVIDSVPGAEGAIQIGSFYTNFPEFNSPGNGSFSSMKMISDGSKQSNPIPESSLLNHGSGTHSKSLPSSCSQTFGPSSFCASTAAQQHSTPINALSNADTLMREKPGGLLPMACSDADLHTLNRHEQNLLPAAECLKSFGGLPDLETLPILLESSSHNSGDGDLQLEIARRLNLDYISRVDLRYLDDDREYWVLLACDADLQECIHIFRASQSHTLRLSLQHASNPYLGSPFGSSDLS

SEQ ID NO: 89 - protein, 878 aa, Lotus japonicus
MEYGSLLVQQQQQQDCNSAYGSLSNLSSDCGSVTTAEADHHIIEELLVQGCWVEVSGVGVREGELQLQQDESSFVVGKRWWIGPAAAVAGSCNSSVKERLVIAVGYLKDYTRNSNVLIQIWVPLRRGILHDHDYHTNYLLSNNPPPQPEAAADHESVSLGFPMPAAPNSNLYSNVHVRFFRSHEYPRVQAQQYGSLALPVFERGTGTCLGVLEIVITNQTTINYNVSNALDQAVDFRSSQSFIPPAIKVYDELYQAAVNEIIEVMTSVCKTHNLPLALTWAPCIQQGKCGCGVSSENYMWCVSTVDSACFVGDLDILGFQEACSEYHLFRGQGIVGTAFTTSKPCFAIDITAFSKAEYPLAHHANMFGLHAAVAIPLRSVYTGSAADFVLEFFLPKDCHDSEEQKQLLNSLSMVVQQACRSLHVVLVEDEYTLPMPSHTSKEELEEEEITITNNHEQKLFVSPSSHESECSKESSWIAHMMEAQQKGKGVSVSLEYLEEPKEEFKVTTNWDSSTDHDQQAQVFSSDFGQMSSGFKASTVEGGDQESSYTFGSRRSSSGGRKSGEKRRTKAEKTISLQVLRQYFAGSLKDAAKSIGVCPTTLKRICRQHGITRWPSRKIKKVGHSLKKLQLVIDSVQGAEGAIQIGSFYASFPELSSSDFSASCRSDSSKKMHNYPDQNNTLYGHGDHGGVVTSLKSPPSACSQTFAGNQPCTIINNGDVLMTESPPVPEALLSRRDHCEEAELLNNASIQEDTKRFSRPKSQTLPPLSDSSGWNSLETGAFRVKATFADEKIRFSLQPIWGFSDLQLEIARRFNLNDVTNILLKYLDDDGEWVVLACDGDLEECKDIHRSSQSRTIRLSLFQASPLNLANTFRNSSPS

SEQ ID NO: 90 - protein, 904 aa, Lotus japonicus
MGDGAVTTTSAAMMEAPTNETSMDFEYMSDLLLDGCWLEASADGSNFLLQQSPPFSSPLFDPSFSWPALETNEPTHVEDQHESQEAPLGNTQLVSQSQNMVNVVDGRYNNQSETETHSVVEGTSDGVKRWWIAPTCSPGLGPSIMEKLIRALKWIKQFNWNKDMLIQIWVPVPRGDRPILSANNLPFSLDSGSENLARYREISEGFQFSAEEDSKELVPGLPGRVFRDKVPEWTPDVRFFRSDEYPRVEHAREFDICGTLAVPIFEQGSRTCLGVIEVVMTTQQINYVPQLESVCKALEVVDLTSLKHSSIQNAKQARDKSYEAALPEIQEVLRSACHMHKLPLAQTWVSCFQQGKDGCRHSEDNYLHCISPVEQACYVGDPSVRFFHEACMEHHLLKGQGVAGKAFMINQPFFSTDITMLSKTDYPLSHHARLFGLRAAVAIRLRSIYSSADDYVLEFFLPVNCNDSEEQKNMLISLSIIIQRCCRSLRVITDKELERTSSSVEVMALEDSGFARTVKWSEPQHITSVASLEPEEKSSETVGGKFSDLREHQEDSILKGNIECDRECSPFVEGNLSSVGISKTGEKRRAKADKTITLEVLRQYFPGSLKDAAKNIGVCTTTLKRVCRQHGIKRWPSRKIKKVGHSLQKLQLVIDSVQGASGASFKIDSFYSNFPDLASPNLSGASLVSALNQSENPNSLSIQPDLGPLSPEGATKSLSSSCSQGSLSSHSCSSMPEQQPHTSDVACNKDPVVGKDSADVVLKRIRSEAELKSHSENKAKLFPRSLSQETLGEHTKTEYQSYLLKTCHKATPKEDAHRVKVTYGDEKTRFRMPKSWSYEHLLQEIARRFNVSDMSKFDVKYLDDDLEWVLLTCDADLEECIDVCLSSESSTIKLCIQASSGMRS

SEQ ID NO: 91 - protein, 766 aa, Lupinus angustifolius
MEYSALVHNSGVFGSFSSDTDEAADLADELLAEGCWVETTDGDHIQQQQDIEINGGSFVGKRWWIGPTSSSSTSTSSSVKERLVVSVGYLKEYTKNTNVLIQIWVPQSTRSSGFEFNHDLVVTSTNPNSNVRFFRSQDYPRVHHQLQQYDVRGCLSLPVFQRGTATCLGFLEITTTNHNSSSFINYHHRPQQLIDNNLSIPLDHGAADFRSCHQNFIPPSSVKVYDELYQAALDEIVDVLTSVCKTHNLPLALTWAPCIQQGKCGCGHSTTDQNYVYCVSTVDSACFVADLDMLGFQEACSQYHLFRGQGIVGTAFTTAKPCFAIDITAFSKAEYPLCHHASMFGLHAAVAIPLRSVYTGSADFVLEFFLPKDCHDPEEQRHMLKSLSMLVQQACRSLHVVTEDEFTLPLPPPPPPLLSSSYNKEEEAHMIEKLLFASTPCCSSQVESSSSWIAHMMEAQEKGKGVSVSLEYEVEEAKEEFKVTKWDGSNEVVVEGERREVFSSEFSELSSGSRSRASTVEVGSGGGEECYSFSGRRSSSTTTTTTTNSGCGLRKTGEKRRTKAEKTISLPVLRQYFAGSLKDAAKSIGVCPTTLKRICRQHGITRWPSRKIKKVGHSLKKLQLVIDSVQGAEERHPNDHAFLKRELLIQEDTRSKAAGLRVKASFVDEKIRFSLQTNWSFRELEVEIGSRFSINDMRNIVVKYLDDEGEWVVLACDADLEECKDLHRSSQGRTIRLSLFQSSPNNTNNNTNAMFGGCSSTSPSSN

SEQ ID NO: 92 - protein, 866 aa, Lupinus angustifolius
MNFSSMDDDDAVSAPGTTILDDGTISMDFDYIDELFFDGCWFETTAEGSDFPPFDSSFSWCALEEQHESQEAFFDDVKVDDVSSNQQYESEIQSFEGTSEGVTRWWIAPTPNNPGPGYSVMEKLMMALNCIQDLNRSKDMLIQIWVPVNRGGKQILTTNDLQFCLGTNSTNLAKYREISMRYQFSTEEEDSKGLVPGLPGRVFREKVPEWTPDVRFFRSDEYPRVDHAQEYEVRGTLALPIFEQGSRTCLGVIEVVMTSSQINYRSELESVCKALEGVDLRSSKLSSTQNVKACNKSYEAVLPEIKEVLRVACEMHKLPLAQTWIPCIQQGKEGCRHSEDNYLHCISPVEHACYVNDAPIRAFHDTCSEHHLLKGQGVAGGAFMTNQPCFSSDITSLRKTDYPLSHHARIFGLQGAVAIRLRSIYSSTDDYVLEFFLPVNCNDSEEQKKMLTSLSMIIQSVCHSLRVITDNELEEETNLSFGELIALADSRSARTEEKSSGTMVGKFSDLKQLQDLNENLDGVGECSTFGEGNLSSVGISKMGEKKRTKADKTITLQVLRQYFSGSLKDAAKNIGVCTTTLKRICRQHGIKRWPSRKIKKVGHSLQKLQLVIDSVQGASGAFQIDSFYSNFPDLASPNLSGTGLLSTLKQSDNPNSLSTTQPNLAGSLTPEDASKSRSSSCSQNSISSHPCSSMSEQQHQTINVVDDNKDLVVVGEDYTDVLLKRNRSEAELKRLSQQDNKAKLFPRSLSQETLVEQHPKTNSIMAPKKDDFHRVKVTYGDEKTRFRMLKTWAYEDLLHEICSRFNISDMSKYDVKYLDDDCEWILLTCDADLEECIDCCQSSECSTIKLSLQVSDLRMRSSLEFT

SEQ ID NO: 93 - protein, 844 aa, Lupinus angustifolius
MNFSSMDDDDAVSAPGTTILDDGTISMDFDYIDELFFDGCWFETTAEGSDFPPFDSSFSWCALEEQHESQEAFFGTSEGVTRWWIAPTPNNPGPGYSVMEKLMMALNCIQDLNRSKDMLIQIWVPVNRGGKQILTTNDLQFCLGTNSTNLAKYREISMRYQFSTEEEDSKGLVPGLPGRVFREKVPEWTPDVRFFRSDEYPRVDHAQEYEVRGTLALPIFEQGSRTCLGVIEVVMTSSQINYRSELESVCKALEGVDLRSSKLSSTQNVKACNKSYEAVLPEIKEVLRVACEMHKLPLAQTWIPCIQQGKEGCRHSEDNYLHCISPVEHACYVNDAPIRAFHDTCSEHHLLKGQGVAGGAFMTNQPCFSSDITSLRKTDYPLSHHARIFGLQGAVAIRLRSIYSSTDDYVLEFFLPVNCNDSEEQKKMLTSLSMIIQSVCHSLRVITDNELEEETNLSFGELIALADSRSARTEEKSSGTMVGKFSDLKQLQDLNENLDGVGECSTFGEGNLSSVGISKMGEKKRTKADKTITLQVLRQYFSGSLKDAAKNIGVCTTTLKRICRQHGIKRWPSRKIKKVGHSLQKLQLVIDSVQGASGAFQIDSFYSNFPDLASPNLSGTGLLSTLKQSDNPNSLSTTQPNLAGSLTPEDASKSRSSSCSQNSISSHPCSSMSEQQHQTINVVDDNKDLVVVGEDYTDVLLKRNRSEAELKRLSQQDNKAKLFPRSLSQETLVEQHPKTNSIMAPKKDDFHRVKVTYGDEKTRFRMLKTWAYEDLLHEICSRFNISDMSKYDVKYLDDDCEWILLTCDADLEECIDCCQSSECSTIKLSLQVSDLRMRSSLEFT

SEQ ID NO: 94 - protein, 847 aa, Lupinus angustifolius
MEYDALVNNNSGLFGSLSSSVDTDEAIDLTDELLVEGCWVETTTGGGDHIHQLHQDIELLNGGSLVGKRWWIEPSTTTSSLSSSVKERLVVAVGYLKEYTKNTNILIQIWVPQRSNSRLPPFEFNHDHLVTPTNVKFFRNQQVHHQLQQYDVRGCLTLPVFQRGTATCLGVLQITTTTNHNSSPFTTYHRPQQLIHNNLSLPLDHAVVDFRSCQNLIPTSSVKVYDDELYQAALNEIVEVLTSVCKTHNLPLALTWAPCIQQGKYGCGHSATDQNYVYCVSTVDSACFVVDLDILGFQEACSQYHLYRGQGIVGTAFTTAKPCFAIDITAFSKAEYPLSHHANMFGLHAAFAIPLRSLYTASADFVLEFFLPKDCHDPEEQRHMLNSLSMLVQQGCRSLHVVTEDEFTLPLPSPPPPPPPPHNKEEAHMIEKLLFASTLSSSQVESSSWIAHMMEAQQKGKGVSVSLEYELEEPKEEFKVTTNWDGSNELIQAQTTQVFSEFTEQSSGSRSRASTVEVGTGGGEECYSFSGRHSSTTTTTTTNSGGGGRKTGDKRRTKAEKTISLPVLRQYFAGSLKDAAKSIGVCPTTLKRICRQHGITRWPSRKIKKVGHSLKKLQLVIDSVQGAEGAIQIGSFYTSFPELCSDSSNKMHTEYDNNNNNNNNNGFYNGDVCSQNFAASSMINNTNNNGGVDVLMMTESSPDHHHDHAFVNRELSIQEDTKLYFTRSKAAPSGWRGALRVKATFLDEKIRFSLQPKWGFRELQVEIRKRLNLNDVRNIDLKYLDDEGEWVVLACDGDLEECKDLHRSSQGRTIRLSLFQASPVHNNNNNLSNTFSGGRSTTPSSSS

SEQ ID NO: 95 - protein, 860 aa, Lupinus angustifolius
MGDDATILDDGTISMDFDYMNELFFDGCWLETTAEEFDFPLFDSSLFSWNVLENEHESQEALFSTQDNIVNVDVSSNKQNQSEIQSLEGASEGFTRWWIAPTPNNPGTSYSVMEKLMKGLKCIHDLNRNKDMLIQIWVPVNRGGKQILTTNDHQFCLGTRSTNLAKYREISMRYHFSTEEDGSKGLVPGLPGRVFKEKVPEWTPDVRLFRIDEYPRVDHAQEYEVRGTLALPIFEQGSRTCLGVIEVVMTTSQLNYRPELESVCKALEAVDLRSSKLSSIPDLKASHKSYEAVLPEIREVFRSACEMHKLPLAQTWIPCIQQGKEGCRHSEDNYLHCISPVEHACYVNDPSIRAFHDACSEHHLLKGQGVAGGAYMTNQPCFSSDITSLSKTDYPLSHHARMFGLQGAVAICLRSIYNSMDDYVLEFFLPVNCIDSEEHKRMLTSLSMIIQRVCHSLRVITDKELESETNLLVDEVTALADNRSRRTAICKEVLQDGMVDSLDTEEKSKGAKFSDLRQQQDLKGNLDSVGGCPTFGEGNLSSVGISKTEEKKRTKADKTITLQVLQQHFAGSLKDAAKNIGVCTTTLKRICRRHGIKRWPSRKIKKVGHSLQKLQLVIDSVQGASGACQIDSFYSNFPDLLSPNLSGTDMLSTLKQSDNPNSLSPKDVLKSPSSSCSQSSISSHLCSTMSEQQYHTSNAVEGNKDSIVVEDSANVASTRIRNEAELRSLVSQDNEEKLLPISLSQETLGEQQHPKTKGNATKKEESHRVKVTYGDEKSRFRMPTTWSYENLLQEIGMRFHISNMSKFNVKYLDDDCEWVLLTCDADLEECIDVCQSSENRTIKLALQVSNLGLRSSLEFT

SEQ ID NO: 96 - protein, 855 aa, Lupinus angustifolius
MEYSALVHNSGVFGSFSSDTDEAADLADELLAEGCWVETTDGDHIQQQQDIEINGGSFVGKRWWIGPTSSSSTSTSSSVKERLVVSVGYLKEYTKNTNVLIQIWVPQSTRSSGFEFNHDLVVTSTNPNSNVRFFRSQDYPRVHHQLQQYDVRGCLSLPVFQRGTATCLGFLEITTTNHNSSSFINYHHRPQQLIDNNLSIPLDHGAADFRSCHQNFIPPSSVKVYDELYQAALDEIVDVLTSVCKTHNLPLALTWAPCIQQGKCGCGHSTTDQNYVYCVSTVDSACFVADLDMLGFQEACSQYHLFRGQGIVGTAFTTAKPCFAIDITAFSKAEYPLCHHASMFGLHAAVAIPLRSVYTGSADFVLEFFLPKDCHDPEEQRHMLKSLSMLVQQACRSLHVVTEDEFTLPLPPPPPPLLSSSYNKEEEAHMIEKLLFASTPCCSSQVESSSSWIAHMMEAQEKGKGVSVSLEYEVEEAKEEFKVTKWDGSNEVVVEGERREVFSSEFSELSSGSRSRASTVEVGSGGGEECYSFSGRRSSSTTTTTTTNSGCGLRKTGEKRRTKAEKTISLPVLRQYFAGSLKDAAKSIGVCPTTLKRICRQHGITRWPSRKIKKVGHSLKKLQLVIDSVQGAEGAIQIGSFYTSFPELCSASARSDSSNKMHAYHPKTECDNNNNNGFYNGDACSQNFAASTMMMINNTNDNSNNNNNNNSNGGVDDVVMMTERHPNDHAFLKRELLIQEDTRSKAAGLRVKASFVDEKIRFSLQTNWSFRELEVEIGSRFSINDMRNIVVKYLDDEGEWVVLACDADLEECKDLHRSSQGRTIRLSLFQSSPNNTNNNTNAMFGGCSSTSPSSN

SEQ ID NO: 97 - skipped

SEQ ID NO: 98 - protein, 1052 aa, Malus x domestica
MEVRVVYTGKGWVEFVGKMDENHRKTLRVETGLRVEGELGRFPPSSFPLLSSLLIVRLLQGAVMDDGVLSPATMLGAQPDSAMDLDFMDELFLEGCWLEARDGPEFPNQSLPNTPLNPSFFWHTLETNGNMAMTPSQNSNQEEMQTPFFKQLEEGPVNPQSPCQSMIEDVVAYSGQSEDPTIGRELSRRWWIGPTGNDGSASSVTQRLMTALMYIREVMRNKDVLVQVWVPVNRGGRDVLTTNELFCLDPNCSRLAKYRDISVNYQFSTGEDSTEMVKGLPGRVFSGKVPEWTPDARYFTSDEYPRVGYAQQYDVSGTLALPIFEQGSRTCLGVIEVVTTDQKIRYQPDIDGICKALEGCDKPYHAALPEIQEILRSACETHKLPLAQTWVSCIEQGKDGCRHSDDNYIHCVSTVDHACHVADPYIQGFHEACSEHHLLRGQGIVGRAFMTNQPCFSDDITSFFKTEYPLSHHARMFNLHAAVAIRLRSTDTSSTDFVLEFFLPLECRDPKEQKKMLNSLSLIIQQTCRSLRVVTDKEVEEETKFHVSEVIVPSDPGPSNIACFTEVQQNGNAVSMFPNKKQRKVLSVKLSKLRQHQEYSNLKSVECGEEFSVLGEGEGSFSTVGASKTREKRRAKAEKDINLQVLRKYFSGSLKDAAKSIGVCSTTLKRICRQHGIKRWPSRKIKKVGHSLQKLQRVIDSVEGASGAFQINSFYTNFPELTSPKLLGTSPFSNSKLSDQPNQENLSPEGGDFSPQATASKSPPSSCSQNSSSSQCCSSKTRQHPFSCNVAGNDDPVGDNSRDGVLKRVRSEAGLHDFCQDRTELLPRSQSQKILSEQQNLQSIPPSLKNNGRVAQVEVQRVKVAYGDEKTRFRMQSNWRYEDLVQEIAKRFSIQDMSNFDIKYLDDDSERVLLTCDDDLEECVDIDGKEGWEEQSDEGMGVGKNNEGMVSPGFSPNVPMRISQIPRSILPPNRPNHSLLLNSKQKLQHGFQRFGLSVAKPTRSLCTKAVLSEIPNQELYGKVGANSTGPIPIGQLVGAVEKAAKTGAEFSL

SEQ ID NO: 99 - protein, 501 aa, Manihot esculenta
MEDGGFKTDSVSRNLPGAAMDLDFMDELLYDGCWLTTDGLNISQPGLSSSTVPNDSSQYFPFVDTNLHQQINQDGMENNFPENPPLSNPKVEQLADDESQDHKSVKITTSSVSAGFPNEGSELSRSFWIEPRADPGPTSSVKVRLMHAIRRLKECTKDREVLVQIWVPTKKEGKHVLTTTDQPCFVSLKSESLARYRYVSENYHFPVEGDSKESLGLPGRVFLGKLPESTPDVRFFRNDEYPRKTYAKQYNISGSLAVPVFERGTGTCLGVVEVITTTRYINYRSELETICKALEAFDLRSSQDFCPPSVKACKEFCQAAVPEISEILGSVCETHKLPLALTWARCFQQGKGGCRHFDEKFANCISTVDSACFVDDRECLVFHAACSEQFLSLGQGIVGRAFVTNKQCFASDVTAFSKTDYPLSHHAKVLGLHAAVAIPLRSTHDGSADFVLELFLPKDCRDPEEHKQMQELLPIAIQQACRSLQVVMDKELEDVGGSAER

SEQ ID NO: 100 - protein, 654 aa, Manihot esculenta
MEDGGFKTDSVSRNLPGAAMDLDFMDELLYDGCWLTTDGLNISQPGLSSSTVPNDSSQYFPFVDTNLHQQINQDGMENNFPENPPLSNPKVEQLADDESQDHKSVKITTSSVSAGFPNEGSELSRSFWIEPRADPGPTSSVKVRLMHAIRRLKECTKDREVLVQIWVPTKKEGKHVLTTTDQPCFVSLKSESLARYRYVSENYHFPVEGDSKESLGLPGRVFLGKLPESTPDVRFFRNDEYPRKTYAKQYNISGSLAVPVFERGTGTCLGVVEVITTTRYINYRSELETICKALEAFDLRSSQDFCPPSVKACKEFCQAAVPEISEILGSVCETHKLPLALTWARCFQQGKGGCRHFDEKFANCISTVDSACFVDDRECLVFHAACSEQFLSLGQGIVGRAFVTNKQCFASDVTAFSKTDYPLSHHAKVLGLHAAVAIPLRSTHDGSADFVLELFLPKDCRDPEEHKQMQELLPIAIQQACRSLQVVMDKELEASSLNEPYPLGSSWFAQMLEAQQKGKRVCVSWDNPEEPKEEFKVATHWDEGLEKLYEGQVFAESGQLQQNSGRKDSTEGGNNSSFAGQQSLGSRKTGEKRRTKTEKTISLEVLRQYFAGSLKDAAKSIGVCPTTLKRICRQHGISRWPSRKLKKKTFINDE

SEQ ID NO: 101 - protein, 933 aa, Manihot esculenta
MEDHILSPGTMLLGAHADSTMDFDYMDKLLLEGFRLESIDGSEFFNPSSSSSAACVDSSFLWPASEISNGNFASSRSNQEDEHILLPRIAPPNEAHGRSLVTAQAHGEDIGSAYRLGDNTVDGSEVSRRWWIGPRTSPGSKTSVRDRLIRALGYIKDFTKDNNILIQIWVPVDKGGRRVLTTHDQCFALVPNCQRLANYRHVSINYQFLAEEDSKHMVGLPGRVFLGKVPEWTPDVRFFRSDEYPRVHDAQLCDVRGTLALPVFEQGSRTCLGVIEVVMTKQKIKYHPELERICKALEAVNLQSSEVPSLQHVKACDTSYQAVLPEIHEVLKSACETHKLPLAQTWVPCIQQGKGGSRHSDENYYRCVSTVDHACYVRDSGVQAFQEACSEHHLLKGQGVAGEAFLTNQPCFTSDLTSYGKTEYPLSHHARMFGLHAAVAIRLRSVHTGTADFVLEFFLPADCKDPEEQKKMLTSLSIIIQEVCQSLRVVTDKELEEENDLPISEVLALSYGTPPDEEMFRVTQPYSESYHGDNLSWSDSFPGIQQSGSAVSSFQIEKQKLLIHEKSVDCRQTQEDYSPKVSVEYGGDSAIAEGSFSSVCVSKTGEKRRTKGEKTITLQVLRQYFAGSLKDAAKSIGVCPTTLKRICRQHGIKRWPSRKIKKVGHSLRKLQVVIDSVQGASGAFQIDSFYTKFPELASPNLSRSTPLSTSKQLGHPESSSIQPEGGIFSSQVAAPKSPSSSSSQSSSSSHCCSSGTEQHASTLTIPTCKDLMLGENSGNCVLKGVKSDAELHVSIQEEQNLLPRSQSQKSLWEQPNLGNLPPLAKSSNRICQEIDGQRVKVTYGNEKIRFRMPNNWELKDLLQEIARRFNIDDIHKYDLKYLDDDSEWVLLTCDDDLEECIDLCQSSQSHTIKLLLQISPHLLDRSTNSRGLS

SEQ ID NO: 102 - protein, 934 aa, Manihot esculenta
MEDRILSTGAMLGTRADSAMDFDCMDKLLLEGCWLETIDGSEFFNPSPFSSAAFVDASFQWPTSEINNCDLASSPSKRSNREEEQISLLPRNSALNEAHGRSLINAEALDHGVGSADRLGYNTTEGSEVSRRWWIGPRTNPGPKTSVRDRLIRALGYIREFTKDKDVLIQIWVPVDKGGRRVLTTHDQRFALVPNCQRLANYRDISTNYQFSVEEDSKDMVGLPGRVFLGKVPEWTPDVQFFRSDEYPRVDHAQQYDVRGTLALPVFEQGSSTCLGVIEVVTTKQKIKYHPELESVCMALKAVDLQSSEVPSLQHVKMCDMSYQAVLPEIHEVLRSACETHKLPLAQTWVPCIQQGKGGCRHSDNNYYRCVSTIDLACYVHDTGVQAFHEACSEHHLLKGQGVAGEAFLTNQPCFSSDITSYRKTEYPLSHHARMFGLHAAVAIRLRSLHSGAADFVLEFFLPAYCTDPEKQKEMLTSLSITVQQVCQSLRVVTDKELEEETGCPISELLASSVDTPPKEEMLVTQPYSVSYGGESLSHADRLTGIQQSGSVVSSCQKKKQKVLEDQISVDCWQNQEDYSLKVSVESGGDSAVAEGSFSSVFKGKKGEKRRTKAEKSITLQVLQRYFAGSLKDAAKSIGVCPTTLKRICRQHGIKRWPSRKIKKVGHSLQKLQLVIDSVQGASGSFQIGSFYTNFPELASPNLSRSNLFSTLKQSDHPEPSSIQSERVIFSSQAATPKSPSSSCSQSSNSSHCISSGTQLHASAVTTPTSEDPVLGENSDNCVLKRARSDAELRASIQEQNLLPRSQSQKSLGEQPNLGNLLPLPNNSSSILRDFDTQRVKVTYGNEKIRFRMPNNWELKDLLQEIARRFNIDDIHKYELKYLDDESEWVLLTCDDDLEECIDVCQSSQTHTIKFLLQVSPHLFDRSMNSRGLS

SEQ ID NO: 103 - protein, 924 aa, Manihot esculenta
MLGTRADSAMDFDCMDKLLLEGCWLETIDGSEFFNPSPFSSAAFVDASFQWPTSEINNCDLASSPSKRSNREEEQISLLPRNSALNEAHGRSLINAEALDHGVGSADRLGYNTTEGSEVSRRWWIGPRTNPGPKTSVRDRLIRALGYIREFTKDKDVLIQIWVPVDKGGRRVLTTHDQRFALVPNCQRLANYRDISTNYQFSVEEDSKDMVGLPGRVFLGKVPEWTPDVQFFRSDEYPRVDHAQQYDVRGTLALPVFEQGSSTCLGVIEVVTTKQKIKYHPELESVCMALKAVDLQSSEVPSLQHVKMCDMSYQAVLPEIHEVLRSACETHKLPLAQTWVPCIQQGKGGCRHSDNNYYRCVSTIDLACYVHDTGVQAFHEACSEHHLLKGQGVAGEAFLTNQPCFSSDITSYRKTEYPLSHHARMFGLHAAVAIRLRSLHSGAADFVLEFFLPAYCTDPEKQKEMLTSLSITVQQVCQSLRVVTDKELEEETGCPISELLASSVDTPPKEEMLVTQPYSVSYGGESLSHADRLTGIQQSGSVVSSCQKKKQKVLEDQISVDCWQNQEDYSLKVSVESGGDSAVAEGSFSSVFKGKKGEKRRTKAEKSITLQVLQRYFAGSLKDAAKSIGVCPTTLKRICRQHGIKRWPSRKIKKVGHSLQKLQLVIDSVQGASGSFQIGSFYTNFPELASPNLSRSNLFSTLKQSDHPEPSSIQSERVIFSSQAATPKSPSSSCSQSSNSSHCISSGTQLHASAVTTPTSEDPVLGENSDNCVLKRARSDAELRASIQEQNLLPRSQSQKSLGEQPNLGNLLPLPNNSSSILRDFDTQRVKVTYGNEKIRFRMPNNWELKDLLQEIARRFNIDDIHKYELKYLDDESEWVLLTCDDDLEECIDVCQSSQTHTIKFLLQVSPHLFDRSMNSRGLS

SEQ ID NO: 104 - protein, 912 aa, Manihot esculenta
MDHGASALNSTVWTFSSTTMDLDVMDKPLSQGYCLENNDRANSLEPEPFTSHVLYDHSEYSSFSEDLYHQIYRKEMKPLFENIPSAYHGIEGAETAKSFVQSESFTLEGSNSGSRWLIDPSYSVKQRLMLAIKYLKEYVEDSDVLIQIWVPTQIGGQNVLTTIDQPYSLNPSCKSLASYRNVSKTFQLTAEENLKELAGLPGRVFLGKLPEWTPDVRFFRSDECPRKSYAKMYNISGCLALPVFEQDNGVCLAVVEIVTTTQKISYSLELEIVGRALEAVDLKSSQDFFPLGIKACNESYQISILEISDILQFVCKTHGLPLAMTWALRDRQGEVEHWQFSKKYDYCLSTVDSACYVADSDLLGFHEACSEHYLFPNQGIVGKAFTTKKQWFATDITSFSKANYPLSHHARMFNLRAALAVPLCNIYTGLIEFVLELFFPWDCKDIEEQKHFWDMLSIVMQQACKSFHVIVDKEIDEEVSEQMVVASDGRYNREGIQELVASPSNESSQEESSSTPHEMDSQNKDKFSFISWECPKEELEDEFKVITHWENDEMGLYQEPVFSDFQKATQSSMPKPGVDIAENFSNGRHCSSSSEKASDKRQTKIEKTITLQILRQYFAGSLKDAAKSIGVCPTTLKRICRQHGINRWPSRKIKKVDHSLRKLQLIVNSIHGAEGLIQIDSFYKSFPELSSSKFSGNDPFSSSRMSENSCILKPQPRSRLFSPKGKVPKSRSSSCSQNSGSTDEEKRLTTINGLNTGCSLAIDDPVLMLKKAYSKPELHNLNQEEKEPKVLKSSLSHKTLHGNTTGHSLQDGMVFRVKATFGEENIRFSFLPNWDFRDLQQEIAKRFKIDDFSRIDLKYLDIDQEPVLLTCDADLEECIDLLRLSQCNTIKISLHQASKSNLGSSFRIKGLF

SEQ ID NO: 105 - protein, 930 aa, Manihot esculenta
MEDGGFKTDSVSRNLPGAAMDLDFMDELLYDGCWLTTDGLNISQPGLSSSTVPNDSSQYFPFVDTNLHQQINQDGMENNFPENPPLSNPKVEQLADDESQDHKSVKITTSSVSAGFPNEGSELSRSFWIEPRADPGPTSSVKVRLMHAIRRLKECTKDREVLVQIWVPTKKEGKHVLTTTDQPCFVSLKSESLARYRYVSENYHFPVEGDSKESLGLPGRVFLGKLPESTPDVRFFRNDEYPRKTYAKQYNISGSLAVPVFERGTGTCLGVVEVITTTRYINYRSELETICKALEAFDLRSSQDFCPPSVKACKEFCQAAVPEISEILGSVCETHKLPLALTWARCFQQGKGGCRHFDEKFANCISTVDSACFVDDRECLVFHAACSEQFLSLGQGIVGRAFVTNKQCFASDVTAFSKTDYPLSHHAKVLGLHAAVAIPLRSTHDGSADFVLELFLPKDCRDPEEHKQMQELLPIAIQQACRSLQVVMDKELEGNRSWQMAIASNEINNKQETHIFAASSLNEPYPLGSSWFAQMLEAQQKGKRVCVSWDNPEEPKEEFKVATHWDEGLEKLYEGQVFAESGQLQQNSGRKDSTEGGNNSSFAGQQSLGSRKTGEKRRTKTEKTISLEVLRQYFAGSLKDAAKSIGVCPTTLKRICRQHGISRWPSRKLKKVGHSLKKLQLVIDSVQGAEGAIQIGSFYNTFPELTSPSFCRKPSLMMNENLKPLNPQPESGTSNAGATASKSPSSSCSQSSGSSISCSTGAKEHTITNNTSNTEDALAVEDPGGVLKRTLSDAELHALYREEPKPLARSQSHKILGDQPSLDQILPPLGKGSGKNLRENGAFRVKANFGEDKVRFSLQPSWCFKDLQQELAKRFNISDVCKIDLKYLDDDHEWVLLTCDADLEECKDIYRLTQSQTIKLSVHQASQNLR

SEQ ID NO: 106 - protein, 906 aa, Manihot esculenta
MEDGGFKTDSVSRNLPGAAMDLDFMDELLYDGCWLTTDGLNISQPGLSSSTVPNDSSQYFPFVDTNLHQQINQDGMENNFPENPPLSNPKVEQLADDESQDHKSVKITTSSVSAGFPNEGSELSRSFWIEPRADPGPTSSVKVRLMHAIRRLKECTKDREVLVQIWVPTKKEGKHVLTTTDQPCFVSLKSESLARYRYVSENYHFPVEGDSKESLGLPGRVFLGKLPESTPDVRFFRNDEYPRKTYAKQYNISGSLAVPVFERGTGTCLGVVEVITTTRYINYRSELETICKALEAFDLRSSQDFCPPSVKACKEFCQAAVPEISEILGSVCETHKLPLALTWARCFQQGKGGCRHFDEKFANCISTVDSACFVDDRECLVFHAACSEQFLSLGQGIVGRAFVTNKQCFASDVTAFSKTDYPLSHHAKVLGLHAAVAIPLRSTHDGSADFVLELFLPKDCRDPEEHKQMQELLPIAIQQACRSLQVVMDKELEASSLNEPYPLGSSWFAQMLEAQQKGKRVCVSWDNPEEPKEEFKVATHWDEGLEKLYEGQVFAESGQLQQNSGRKDSTEGGNNSSFAGQQSLGSRKTGEKRRTKTEKTISLEVLRQYFAGSLKDAAKSIGVCPTTLKRICRQHGISRWPSRKLKKVGHSLKKLQLVIDSVQGAEGAIQIGSFYNTFPELTSPSFCRKPSLMMNENLKPLNPQPESGTSNAGATASKSPSSSCSQSSGSSISCSTGAKEHTITNNTSNTEDALAVEDPGGVLKRTLSDAELHALYREEPKPLARSQSHKILGDQPSLDQILPPLGKGSGKNLRENGAFRVKANFGEDKVRFSLQPSWCFKDLQQELAKRFNISDVCKIDLKYLDDDHEWVLLTCDADLEECKDIYRLTQSQTIKLSVHQASQNLR

SEQ ID NO: 107 - skipped

SEQ ID NO: 108 - protein, 933 aa, Medicago truncatula
MEYGGGLVADGGVFGPMVGGGGGDQADIIEELLGEGCWIEASENSLMAMQQTTPQSQYMSNNNNIPMGMGEGDHFNHHHHHHPHPHHQMECTAPAANHDDQQESGFVVGKRWWIGPRANPGPTTSVKERLVVAVGYLKEYTKNSSNNVLIQIWVPMRRRSALIHTQNHYLQQESSSAPVSVNPNMNVHVRFFRSHDYPRHQQQQQYGSLLALPVFERGSGTCLGVIEFVISNQTLINYRPQLDHLSNALEAVDFRSSHNMNIPQAVKVFEELYEAAVNEIMEVLASVCKTHNLPLALTWAPCLQQQQGGGKGSSGASGCGVSTMSCCISTVDSACYVGDMDVLGFQEACSEYHLFNGQGIVGTAFTTTKPCFAIDITAFSKSEYPLAHHANMFGLHAAVAIPLRSVYTGSAADFVLEFFLPKDCRDTEQQKQMLNSLSLVVQQACRSLHLHVVMDDNNNNNMNDNNSSADHDHDQFTFPTTNSYMPSSASEPLSQVDAVSGCSTKDTSSSCSWIAHMMEAQNKGKGVSVSLEYLQEPKEEFKVTTCNWDREREDNVFSEFGQVLQQQQHDQSSNSRASVVSVEAGEESPGACGRRSSSSSSGRKSGDKRRTKAEKTISLPVLRQYFAGSLKDAAKSIGVCPTTLKRICRQHGITRWPSRKIKKVGHSLKKLQLVIDSVQGAEGAIQIGSFYASFPELSNATANGGDGNDNSNNSFYNNNHGDGIVTSLKSPPSACSQTHAGNKLPMTTTTAINHHHVVMTENPTGAPLGVDHAFMHASNINIQDYHQLQEDLDTKQLLLHFNNNNQILPPRPTVAWNNNNSSSSTLLERGAFRVKATFADEKIRFSLQAMWGFRDLQLEIARRFNLTDMNNLVLKYLDDEGEWVVLSCDADLEECKDLHTSSHTRTIRLSLFQASPLNLPNTFRNSSSSSPSS

SEQ ID NO: 109 - protein, 850 aa, Medicago truncatula
MGDGAAVTSSATNTMMEAPPQDENLMDFDYMSELLLDGCWLEASADGSEFLLQSSPFSNPIFDPSFSWPVLENNEQPGNDVRHESQDVPLGTEQESRIIVNNAGSSDLQQCEFKTHLGEGVSRLWIPPTPNPGPGGSSITEKLIRALKWIKDFNRNKDMLIQIWVPVNRGDDRPILRANDLPFSLESRSLNLAKYREISVRYQFSAEVEDSKELVAGLPGRVYRDKIPEWTPDVRFFRSDEYPRVDHAQECDVHGTLAVPVFEQGSRTCLGVIEVVMTTQQSNYGRELETVCKALEVVDLSSSGHSSPQNVKACVKSYETALPEIQEVLRSACEMHKLPLAQTWVSCIQQGKDGCRHSDDNYTHCISPVEYACYVGDSSVRFFHEACMEHHLLIGQGVAGGAFMTNQPCFSTDITSLSKTDYPLSHHARLFGLRAAVAIRLRSIYSISDDYVLEFFLPVDCNDGEEQKKMLTSLSMIIQRVCRSLRVITDKELEKNNLSSNEVMAVADIGFATDAVQSGLQHKRMAVSLDGEEKFNETMSSKFSEQRRQQESLTLRGDADCGRECSPSVEGNFLSSLGVNRTGEKRRAKAEKTITLQVLRQYFAGSLKDAAKNIGVCTTTLKRICRQHGIKRWPSRKIKKVGHSLQKLQLVIDSVQGASGSFQIDSFYSKFSDLSSPNLSGSTLISTLNQVDNPVSLSIQPDPDSLSPEGASKSPSSSCSQSSYSSHSCSSLSEQQHHTNNVAAGNKDSLVGEDSVDVVLKRIRSEAELKSLIPDNKSKLMPRSQSQETLGEHPKTEYRKSLLKTTRKASQKEDAHRVKVTFGDEKTRFRLPKIWCYEDLVQEIARRFNI

SEQ ID NO: 110-130 - skipped (21 entries)

SEQ ID NO: 131 - protein, 860 aa, Mucuna pruriens
MEYGGLVQNGAYGSLSDFLAPETDLIDELLVEGCWLETRVGCGSYLNCGTESNEAQIIFQEESEAESLMVGKRWWIGPRANPGPSSSVKERLVLGVGYLKEYAKNSNVFIQVWVPAVARRGLVTTTHPYSIDLELEYNNNNNNNNNNNNNNNNNDNSYQFQEDWVHQWTPNIRFFRSHDYSRLHQYDIRAGSLALPVFERGTAMCLGVVEIFMPNNPDPDLHNVCHALQVITTIMSFIITLVNSFLILQFMIDEQGGVDFRSCSHQNLIPPAVTVKGLEELYQGALNEIVEVLTCVCKAHKLPLALTWAPCIQQGKSGCGHSKDENYVSTVDGGSYVADVEVLGFQEACSEYHLFGGQGVVGTAFTSTKPCFANDIRGFTKAEYPLAHHANMFGLHAAVAIPLKSVSGDFVLEFFLPKDCHDSQEQKQMLNSLSMLVQQACRSLHVVMEKEAEELALPVVMESSSWIADMMEAQAQAQAQAQAQTQQQHQHLHKGKGVSVSLEYLQEPKQEFKVTTNCNQQELGSVSVEGGGEESYGGRRGARKSGDKRRTKAEKTISLPVLRQYFAGSLKDAAKSIGVCPTTLKRICRQHGITRWPSRKIKKVGHSLRKLQLVIDSVQGAEGAIQIGSFYNSFPELSSASGVSESSKMNNDNNMFYSENGLYNQGQGQGQGQGTGFKSPTSSCSQTQTCNTMINNAGDIVMSEKQAVGASIQVQGDAQHFTHQYHHPILEAQPPLPLPLPLPLPLPLSLPQTSASVWNTATFRVKATFGDEKIRFSLQQNWGFRDLQMEIARRFNLNEISNVQLKYLDDAREWVLLTCDADLEECKDINRSSQTRTIRLFLFQASPLNHANTLGPTSPS

SEQ ID NO: 132 - protein, 679 aa, Mucuna pruriens
MEYGALVQNCAFGSLSECGSVSEEDLIEELLVEGCWVEASGVGSEVQYMASSEAEVGKRWWIGPKANPGPSSSVKERLVVAVGYLREYTKNANVLIQIWVPLRRGVGLGLGLVPDYHRNSDEPMSLNSNVNLRFFRCDEYPRLPYDVPGSLALPVFERGTATCLGVLQIVMPRLDTINYRPQLDNNNLCNINAFEAVDFRSCENLIIPGGVKVFEEAAVNEIVEVLTCVCKTHNLPLALTWAPCIQQGGKCGYGHWTENYVSSVDRACFVGDADLLGFQEACSEHHLFRGQGIVGTAFRTGKPCFAIDITAFTKAEYPLAHHASIFGLHAAIAIPLRSTVYTDFVLEFFLPKDCHDREHQKHLLSSLSLLLQQACRSLHVVVEDEFTLPPLLQTHKSESHGSWISHMMEAQAQAQAHQKGKGVCVSLEYLEEEPKEEFKVTTNCHWDSNYEAAQEQVFSDYGEESHTQTHTLGGGRRGRKSGEKRRTKAEKTISLQVLRQYFAGSLKDAAKSIGVCPTTLKRICRQHGITRWPSRKIKKVGHSLKKLQLVIDSVQGAEGAIQIGSFYSSFPELSTATCESSKSKAEIENPVPLKVKATFADEKIRFSLQPIWGFTDLQVEIARRFNLNEVRNVVLKYLDDEGEWVVLACDGDLEECKDLHTTSQSRTIRLALFQASPSS

SEQ ID NO: 133 - protein, 952 aa, Mucuna pruriens
MDHRVERRSSSFLGARTRVPKRNKRVGLCGSEDTDIILSGVFSFEKTRILRSVWEVRVAMMGDGGVTSSGTMMEAPPSDGTTSMDFDYMGELFLDGCWLEASADGSDFLLQSPSFSTPLFDPSFSWPALDTNHNESHETAFGTQQQSHNNIVNVAGSGSCSQQFQFETHSVEGASEGLRRWWFAPTPNPGPSIMEKLTRALMWIKDYNRNKDMLIQIWVPVHRRGRPILAANDLPFTFDSRSVNLAKYREISVGFEFSVEEGEGESKELLPGLPGRVFRDKVPEWTPDVRFFKSDEYPRVDHAQEYDVRGTLAVPVFEQGSKVCLGVIEVVMTTQHINYGPELESVCKALEAVDLRSSKHLSIQNVKACNRSYEAALPEIQELLRCACEMHKLPLAQTWVPCVQQGKEGCRHSEDNYLLCISPVEHACYVGDPSIRSFHEACTEHHLLKGEGVAGGAFMTNQPCFSDDITSLSKKAYPLSHHARLFRLRAAVAIRLRSIYNNTDDFVLEFFLPVDCNDSEEQRKMLTSLSIIIQRVCHSLRVIRNEELEEANLSVDEVITLADSGFARTAICEELQHKGMVASLDTEEKSSETMGRKFSDPRQQQESPILKGNLDSVRECSTSVEGNLSSVGISKMGERRRAKAKKTITLLVVRQYFVGSLKDAAKNIGVCTTTLKRICRQHGIKRWPSRKIKKVGHSLQKLQLVIDSVQGASGAFQIDSFYSNFPDLASPNLSGTSLFSSMNQSDNPNSISTQPEACASKSPSSSCSQSSISSHSCSSMSEPQHHTTNIAGNKDPMLDEDSADVVLKRIRSEAELKSLSGDNRAKLLPRSQSQETLGDHPKTQYQRPLLKTSSKVDAHRVKVTYGDEKTRFRMPKSWGYEDLLQEIGRRFNVSDMTKFDVKYFDDDSEWVLLTCDADLEECIDVCQSSETGTIKLCLQASSHSMRSSLEFR

SEQ ID NO: 134 - protein, 942 aa, Oryza sativa
MEQKPSPPPPPRSDEEEDGLMGCGMGGTGDIAGGDLDLMEEFLLATPGFDLSEFWHPGAASPFSPLFDIGSSVTTLTTPAPAAGEDDRDEAEMPSRGGGGLEVSPAHRGWTFQTAPQEVAVEPTVKERLRRALERIASQSQSQAQRGDGELLVQVWVPTRIGDRQVLTTCGQPFWLDRRNQRLANYRTVSMKYQFSADESARADLGLPGRVFVGRVPEWTPDVRYFSTEEYPRVQHAQYFDIRGSVALPVFEPRSRACLGVVELVMTTQKVNYSAEIENICNALKEVDLRSSDVSSDPRSKVVDASYRAIIPEIMDVLRAVCDTHNLPLAQTWIPCICQAKRGSRHSDESYKHCVSTVDEACYVRDCSVLGFHQACSEHHLFRGEGVVGRAFGTNEPCFSPDITTYSKTQYPLSHHAKLFGLRAAVAIQLRSVKTGSLDFVLEFFLPMKCINTEEQRAMLNSLSNTIQQVCYTLRVVKPKELVNDGPFEISQPTRPEFYAKSVHEDLDELCSGINVPGRTTSLEASEEVSSWIASLVDAQNKGGKGEIDVDLPFGFSKQDDEGFSVTAGWHTSPVMAPDGSMFSGFKRHEDYDVKENTCSSDPSNSNSDKAVEKRRTKTEKTVSLQDLRKHFAGSLKEAAKNLGVCPTTLKRICRQHGINRWPSRKIKKVGHSLKKLQMVIDSVHGPEGTVQLSSLYENFTKTTWSERELQGDVHFPASEQNFQLEPSVPDRPCEGRFTSHTSGSNSISPSCSQSSNSSLGCSSVPKTQQQHGSAPQLAVKEEISMDENQCSTLIKSASHAEAELQMFVEERPTMLFRSQSQVLLSEHKPIENMSNVQKARSDSLKIKAIYGEERCIFRLQPSWGFQRLKEEIVKRFGISQDTHVDLKYLDDESEWVLLTCDADLLECIDVYKSSSNQTVRILVNPSIQPLLNASFGQTGLS

SEQ ID NO: 135 - protein, 842 aa, Oryza sativa
MEEGDPQPSISLARTPSEGAAAAVDLDLLEQLLSADNAWLEVAANTSRSPNFFATPSNCLTDASVATTTPANSWWIQPSGASTSVRERFDQALAYIRETQSDADVLVQLWVPVKGNDGQLVLTTSGQPFTLDQRSNSLIQFREVSTKYQFSADVASGSSPGLPGRVFIGRLPEWSPDVRYFTSYEYPRINHAQYLDVHGTMGLPVFERGNYSCLGVIELIMTKQKLNFTSELNTICSALQAVNLTSTEVSSIPRAKLNSASYKDALPEILEVLRAACITHKLPLAQTWVTCAQQGKRGSRHSDENYKYCISTIDAACYVNEPRMQSFHEACSEHHLLRGQGVAGKAFTTNQPCFLPDIGSSTKLEYPLSHHAKIFNLKGAVAIRLRCTRTGIADFVLEFFLPTDCEVLEEQKAVLDSLSGTMRSVCQTLRVVTDKEMEDEAMREMNELNSFSPRGKNKVEELSFGDNTRGDREEASWTTLVGTSQKGSDLAELHTHGMLSHGGHGSSQAGDQTSKEGSKVKRRTKTEKTVSLQVLRQYFAGSLKDAAKSLGVCPTTLKRICRQHGINRWPSRKIKKVDHSLRKLQQIIDSVHGAETAFQLNTLYKDLTNTSVSSDNNLSGSVTVPLANQNNLDFEMHQHHRLSSNIPSTSLSHSSCSQSSDSSPSCSGGATKHSPQVGADQVRSGCLPQHSPVQTLQTEAASINEHFSGQEAPIDLLQDVAEKANGEQHMSQSPSSPKQTANVGMRVKVTFGSEKVRFRLKPECDFQELKQEISKRLSIADMNSLIVKYLDDDSEWVLMTCDADLHECFHVYKLADIQTIKISVHLAASPTTRITIGHTGFS

SEQ ID NO: 136 - protein, 967 aa, Parasponia andersonii
MEYGAMMPSNAYGTSFSDATMEVDFMDQLLLEGCWDPAVAAAATGLNFTQPAAPCSSAPRSLIETSHYMPSFESSNTSTAHLITTHHHQIYQDHQETEEGGSDHLQENHSSESNNNNFFMNEANEVGKRLWIGPRPNPGTGPCSSVKERLTLAIDYLKECTRDRDVLIQIWVPIRRGGRQILTTYDQPYSLDPNCKSLASYRMVSREYQFLCEEDSAESVGLPSQAFLGKLPEWTPDVRYFRSYEYPRINYAKQYNVRGSLALPIFERGNGTCLGVVEIVMTTQKVNYRPEIEYVCQALEAVDLRSFQNFSPPAVKVCDELYQAALSEIVEVLVSVCKIHRLPLALTWAPCHQQGKGGCRHSDENYTRCVSTVDLACFVSNLEILGFHEACSEHHLFRGQGIVGTAFTTNKPCFATDITAFSKTEYPLSHHARMFGLRAAVAIPLRSVYTSSSDFVLEFFLPKDCQDPEEQKQMLNSLSIVIQQACRSLHVVEKELEEEQIMLPNGDPAIVASSEGGLKLGTPTTATTTNTTTCPVGDQSSGKESSWVAHMMEAQQQGRGVSVSLDYLTEEPKEEFRVTTHWDNLNHGDLSNGQVFSDFGQLQQCSGSNGSIEGGIDSYSFGGRRSSGARKAGEKRRTKTEKTISLPVLRQYFAGSLKDAAKSIGVCPTTLKRICRQHGITRWPSRKIKKVGHSLRKLQLVIDSVQGAEGAIQIGSFYSSFPQLNSPKFQGNSNDSFSSISPSDHHHHHHHLNNQSNSQPESGFFIHGSAMKSSPSMSSQASGLQQSTTTFSCFNGDPLITEDPSVILKRACSSDEELFASNQDKANLLSRSQSYKALSDQNRILDQTLLPLPDNNERINLTDGFAFRVKANFGEKKIRFSLPPKCSFRDLQLEIMRRFALDDITMIDIKYLDDDREWVLLTCNADLQECLEIHRQSQNRTMRICLQQAPSDQLIEESPFGSSSSPC

SEQ ID NO: 137 - protein, 927 aa, Parasponia andersonii
MEDGVLSPATILGAPADYPMDLDFMDELFLEGCWLETRDGSEFLNQNPPSSNPLFDPLFWPTLEPDGESNANPSPKSNQEERHRSLFVESQGKSPLHTLPPTRATTDVVKYSGVSEAHITEGSSELSRRWWIGPKANPGPSSSVMERLWRALMYIKDVIRDKDILVQIWVPVHKEGRRVLTTRDLPFALDDSGSKLARYRDISVKYQFSAEEDSKDLVLGLPGRVFSGKVPEWTPDVRFFRNDEYPRLIHAQQIDVRGTLALPIFELDSRTCLGVVEIVMTTQKIKYRPELESVCKALEAVDLKSSEVLSTQNVYNEYYQAAIPEIQQVLRSACDTHRLPLAQTWVPCIYQGKEGCRHSDENYGQCVSTVDHACYALDPQVQSFHEACSEHHLFRGQGVVGLAFMTNQPCFSADITSYTKTEYPLSHHARMFRLQAAVAIRLRSIHASAADFVLEFFLPVDCKDPDEQKKMLTSLSLIIQQCCQSLRVITDKELEEESCSRVDEVVVPSNLRPARNTCFTEAPQNDTDLSLFPEEKKPREISDGRLSKLSDNQRDSSLKPSVECVEECSTVGEGSFSSVGVGKTGERRRAKAEKTITLQVLRQYFAGSLKDAAKSIGVCSTTLKRICRQHGIKRWPSRKIKKVGHSLQKLQLVIDSVQGASGAFQIDSFYTNFPELASPNVSGTSPFSTSKLNDHPLPSNMQPGDGGIFSVQAATAAATSKSSSSCSQSSSSSHCCSSRSQLHPQTWNNVTSSDDLIAGENSGGGDDVVLKRVRSEAGLNACSEDDRKLLPRSQSHKSLMKHHKTDKWFPPSSAKNNNNGARIPQQQGEFQRVKVTYGEDKTRFRMQNNWGFIDLQQEVGRRFGIQEMVKFTLKYLDDDSEWVLLTCDADLEECFEVYRSSQNATIKLSLQPSRHLYRGCLRGNDPL

SEQ ID NO: 138 - protein, 604 aa, Parasponia andersonii
MEDGCQSPPNSLMEACFGSAQNSGTSVTFVDLDKSDVYVDDDFFQDINASSFSLKPVTNPGSSFFLGAAASKMTSSGLSQQSFPTMEELNQYENTPRTLEPIGVENRNKNMLQLQADREGDPDCSAGGGGSITSEDGFYWRKYGQKQVVGSKYPRIYYKCMHLNCKVKKKVKRSDEGHITEILHSGVHNHHKPPNPRSAIGSSDSYSPATEKRCPPKNTLDLPQTNFKASSTENSQLDLTSSQKAEVQISLNRSISSDLLNSVAPIQPSYSNIVCDNQAAWPKIKELLKLACQRYRLPLAQTWVPCGHRLFDQDSNSNNDLWAYSISDQAFYARTILMQVFHDVCSEHYLLKGQGIVGEAFVTNKPRFSPDVTSYCKAEYPLTYHTKRLKFRSAVAIPAYWDGSIPPGDRTAPDFVVEFFLPLDCTDVEEQKNMVTSLKSLIALDLCIAAELELEQESGSKQDSDNGLIPRSVTNLTEGKFSSLAETDTSEEPRHKRCSMKRTDLLAGGLKDAEKKSTTRGKNSRSSRGKRDPTWKYCFPIEGNIHGVKCSFCKLVIQGGGITRFKLHLVSNDPSKNVKKCPNVPYEVKDEVENWIRRKDNKRK

SEQ ID NO: 139 - protein, 967 aa, Parasponia rigida
MEYGAMMPSNAYGTSFSDATMEVDFMDQLLLEGCWDPAVAAAATGLNFTQPAAPCSSAPRSLIETSHYMPSFESSNTSSAHLITTHHHQIYQDHQETEEGGSDHLQENHSSESNNNNFFMNEANEVGKRLWIGPRPNPGTGPCSSVKERLTLAIDYLKECTRDRDVLIQIWVPIRRGGRQILTTYDQPYSLDPNCKSLASYRMVSREYQFLCEEDSAESVGLPSQAFLGKLPEWTPDVRYFRSYEYPRINYAKQYNVRGSLALPIFERGNGTCLGVVEIVMTTQKVNYRPELEYVCQALEAVDLRSSQNFSPPAVKVCDELYQAALSEIVEVLVSVCKIHRLPLALTWAPCHQQGKGGCRHSDENYTRCVSTVDLACFVSNLEILGFHEACSEHHLFRGQGIVGTAFTTNKPCFATDITAFSKTEYPLSHHARMFGLRAAVAIPLRSVYTSSSDFVLEFFLPKDCQDPEEQKQMLNSLSIVIQQACRSLHVVEKELEEEQIMLPIGDPAIVASSEGGLKLGTPTTATTTNTTTCPVGDQSSGKESSWVAHMMEAQQQGRGVSVSLDYLTEEPKEEFRVTTHWDNLNHGDLSNGQVFSDFGQLQQCSGSNGSIEGGIDSYSFGGRRSSGARKAGEKRRTKTEKTISLPVLRQYFAGSLKDAAKSIGVCPTTLKRICRQHGITRWPSRKIKKVGHSLRKLQLVIDSVQGAEGAIQIGSFYSSFPQLNSPKFQGNSNDSFSSISPSDHHHHHHHLNNQSNSQPESGFFIHGSAMKSSPSMSSQASGLQQSTTTFSCFNGDPLITEDPSVILKRACSSDEELFASNQDKANLLSRSQSYKALSDQNRILDQTLLPLPDNNERINLTDGFAFRVKANFGEKKIRFSLPPKCSFRDLQLEIMRRFALDDITMIDIKYLDDDREWVLLTCNADLQECLEIHRQSQNRTMRICLQQAPSDQLIEESPFGSSSSPC

SEQ ID NO: 140 - protein, 927 aa, Parasponia rigida
MEDGVLSPATILGAPADYPMDLDFMDELFLEGCWLETRDGSEFLNQNPPSSNPLFDPLFWPTLEPDGELNANPSPKSNQEERHRSLFVESQGKSPLHTLPPTRATTDVVKYSGVSEAHITEGSSELSRRWWIGPKANPGTSSSVMERLWRALMYIKDVIRDKDILVQIWVPVHKEGRRVLTTRDLPFALDDNGSKLARYRDISVKYQFSAEEDSKDLVLGLPGRVFSGKVPEWTPDVRFFRNDEYPRLIHAQQIDVRGTLALPIFELDSRTCLGVVEIVMTTQKIKYRPELESVCKALEAVDLKSSEVLSTQNVFNEYYQAAIPEIQQVLRSACDTHRLPLAQTWVPCIYQGKEGCRHSDENYGQCVSTVDHACYALDPQVQSFHEACSEHHLFRGQGVVGLAFMTNQPCFSADITSYTKTEYPLSHHARMFRLQAAVAIRLRSIHASAADFVLEFFLPVDCKDPDEQKKMLTSLSLIIQQCCQSLRVITDKELEEESCSRVDEVVVPSNLRPARNTCFTEAPQNDTDLSLFPEEKKPREISDGRLSKLSDNQRDSSLKPSVECVEECSTVGEGSFSSVGVGKTGERRRAKAEKTITLQVLRQYFAGSLKDAAKSIGVCSTTLKRICRQHGIKRWPSRKIKKVGHSLQKLQLVIDSVQGASGAFQIDSFYTNFPELASPNVSGTSPFSTSKLNDHPLPSNMQPGDGGIFSVQAATAAATSKSSSSCSQSSSSSHCCSSRSQLHPQTWNNVTSSDDLIAGENSGGGDDVVLKRVRSEAGLNACSEDDRKLLPRSQSHKSLMKHHKTDNWFPPSSAKNNNNGARIPQQQGEFQRVKVTYGEDKTRFRMQNNWGFIDLQQEVGRRFGIQEMVKFTLKYLDDDSEWVLLTCDADLEECFEVYRSSQNATIKLSLQPSRHLYRGCLRGNDPL

SEQ ID NO: 141 - protein, 967 aa, Parasponia rugosa
MEYGAMMPSNAYGTSFSDATMEVDFMDQLLLEGCWDPAVAAAATGLNFTQPAAPCSSAPRSLIETSHYMPSFESSNTSSAHLITTHHHQIYQDHQETEEGSSDHLQENHSSESNNNNFFMNEANEVGKRLWIGPRPNPGTGPCSSVKERLTLAIDYLKECTRDRDVLIQIWVPIRRGGRQILTTYDQPYSLDPNCKSLASYRMVSREYQFLCEEDSAESVGLPSQAFLGKLPEWTPDVRYFRSYEYPRINYAKQYNVRGSLALPIFERGNGTCLGVVEIVMTTQKVNYRPELEYVCQALEAVDLRSSQNFSPPAVKVCDELYQAALSEIVEVLVSVCKIHRLPLALTWAPCHQQGKGGCRHSDENYTRCVSTVDLACFVSNLEILGFHEACSEHHLFRGQGIVGTAFTTNKPCFATDITAFSKTEYPLSHHARMFGLRAAVAIPLRSVYTSSSDFVLEFFLPKDCQDPEEQKQMLNSLSIVIQQACRSLHVVEKELEEEQIMLPIGDPAIVASSEGGLKLGTPTTATTTNTTTCPVGDQSSGKESSWVAHMMEAQQQGRGVSVSLDYLTEEPKEEFRVTTHWDNLNHGDLSNGQVFSDFGQLQQCSGSNGSIEGGIDSYSFGGRRSSGARKAGEKRRTKTEKTISLPVLRQYFAGSLKDAAKSIGVCPTTLKRICRQHGITRWPSRKIKKVGHSLRKLQLVIDSVQGAEGAIQIGSFYSSFPQLNSPKFQGNSNDSFSSISPSDHHHHHHHLNNQSNSQPESGFFIHGSAMKSSPSMSSQASGLQQSTTTFSCFNGDPLITEDPSVILKRACSSDEELFASNQDKANLLSRSQSYKALSDQNRILDQTLLPLPDNNERINLTDGFAFRVKANFGEKKIRFSLPPKCSFRDLQLEIMRRFALDDITMIDIKYLDDDREWVLLTCNADLQECLEIHRQSQNRTMRICLQQAPSDQLIEESPFGSSSSPC

SEQ ID NO: 142 - protein, 967 aa, Parasponia rugosa
MEYGAMMPSNAYGTSFSDATMEVDFMDQLLLEGCWDPAVAAAATGLNFTQPAAPCSSAPRSLIETSHYMPSFESSNTSSAHLITTHHHQIYQDHQETEEGSSDHLQENHSSESNNNNFFMNEANEVGKRLWIGPRPNPGTGPCSSVKERLTLAIDYLKECTRDRDVLIQIWVPIRRGGRQILTTYDQPYSLDPNCKSLASYRMVSREYQFLCEEDSAESVGLPSQAFLGKLPEWTPDVRYFRSYEYPRINYAKQYNVRGSLALPIFERGNGTCLGVVEIVMTTQKVNYRPELEYVCQALEAVDLRSSQNFSPPAVKVCDELYQAALSEIVEVLVSVCKIHRLPLALTWAPCHQQGKGGCRHSDENYTRCVSTVDLACFVSNLEILGFHEACSEHHLFRGQGIVGTAFTTNKPCFATDITAFSKTEYPLSHHARMFGLRAAVAIPLRSVYTSSSDFVLEFFLPKDCQDPEEQKQMLNSLSIVIQQACRSLHVVEKELEEEQIMLPIGDPAIVASSEGGLKLGTPTTATTTNTTTCPVGDQSSGKESSWVAHMMEAQQQGRGVSVSLDYLTEEPKEEFRVTTHWDNLNHGDLSNGQVFSDFGQLQQCSGSNGSIEGGIDSYSFGGRRSSGARKAGEKRRTKTEKTISLPVLRQYFAGSLKDAAKSIGVCPTTLKRICRQHGITRWPSRKIKKVGHSLRKLQLVIDSVQGAEGAIQIGSFYSSFPQLNSPKFQGNSNDSFSSISPSDHHHHHHHLNNQSNSQPESGFFIHGSAMKSSPSMSSQASGLQQSTTTFSCFNGDPLITEDPSVILKRACSSDEELFASNQDKANLLSRSQSYKALSDQNRILDQTLLPLPDNNKRINLTDGFAFRVKANFGEKKIRFSLPPKCSFRDLQLEIMRRFALDDITMIDIKYLDDDREWVLLTCNADLQECLEIHRQSQNRTMRICLQQAPSDQLIEESPFGSSSSPC

SEQ ID NO: 143 - protein, 927 aa, Parasponia rugosa
MEDGVLSPATILGAPADYPMDLDFMDELFLEGCWLETRDGSEFLNQNLPSSNPLFDPLFWPTLEPDGESNANPSPKSNQEERHRSLFVESQGKSPLHTLPPTRATTDVVKYSGVSEAHITEGSSELSRRWWIGPKANPGPSSSVMERLWRALMYIKDVIRDKDILVQIWVPVHKEGRRVLTTRDLPFALDDNGSKLARYRDISVKYQFSAEEDSKDLVLGLPGRVFSGKVPEWTPDVRFFRNDEYPRLIHAQQIDVRGTLALPIFELDSRTCLGVVEIVMTTQKIKYRPELESVCKALEAVDLKSSEVLSTQNVFNEYYQAAIPEIQQVLRSACDTHRLPLAQTWVPCIYQGKEGCRHSDENYGQCVSTVDHACYALDPQVQSFHEACSEHHLFRGQGVVGLAFMTNQPCFSADITSYTKTEYPLSHHARMFRLQAAVAIRLRSIHASAADFVLEFFLPVDCKDPDEQKKMLTSLSLIIQQCCQSLRVITDKELEEESCSRVDEVVVPSNLRPSRNTCFTEAPQNDTDLSLFPEEKKPREISDGRLSKLSDNQRDSSLKPSVECVEECSTVGEGSFSSVGVGKTGERRRAKAEKTITLQVLRQYFAGSLKDAAKSIGVCSTTLKRICRQHGIKRWPSRKIKKVGHSLQKLQLVIDSVQGASGAFQIDSFYTNFPELASPNVSGTSPFSTSKLNDHPLPSNMQPGDGGIFSVQAATAAATSKSSSSCSQSSSSSHCCSSRSQLHPQTWNNVTSSDDLIAGENSGGGDDVVLKRVRSEAGLNACSEDDRKLLPRSQSHKSLMKHHKTDKWFPPSSAKNNNNGARIPQQQGEFQRVKVTYGEDKTRFRMQNNWGFIDLQQEVGRRFGIQEMVKFTLKYLDDDSEWVLLTCDADLEECFEVYRSSQNATIKLSLQPSRHLYRGCLRGNDPF

SEQ ID NO: 144 - protein, 914 aa, Phaseolus vulgaris
MMRDGDVTSSSATMMEASPPDGTTTSMDFDYMGELFYDGCWFEASVDGSDFLLQSPSYSNPLFDPSFSWPALETNHNESQGAAFGTQEEGHNNNVVAARGGGGGGQQFQPETISIEGASDGVRRWRFAPTPSPAPGPSIMEKLVRALMRIKDYNRNKNMLIQIWVPVHRGGRPILAANDILFSLDSRSMNLAKYREISVRYEFSAEEGEVKELVPAEEGDSKELVLGLPGRVFRDKVPEWTPDVRFFRSDEYPRLDHAQEYDVSGSLAVPIFEQGSKMCLGVIEVVMTTQQINYGPELESVCKALEAVDLRSSKQLSIQNVKACNRSYEAVLPEIQQVLRSACEMHKLPLAQTWIPCVQQGKEGCRHSEDNYLFCISPAEHACYVGDPKIRSFHESCTEHHLLKGEGVAGGAFMTNQPCFSDDITSLSKKDYPLSHHARLFGLRAAVAIRLRSIYNSTDDFVLEFFLPVDCNDSEEQRKMLTSLSIIIQRVCRSLRVISDKELVEAKLSIDEGISLADSGFDRTAICEELQHKGTVASLDTEEKLSETTGRKFSDPMRQQKSPILKGNLDCVRESSTSVEGNLSSVGMSKMGDRRRAKAEKTITLQVLRQYFAGSLKDAAKNIGVCTTTLKRICRQHGIKRWPSRKIKKVGHSLQKLQLVIDSVQGASGAFQIDSFYSNFPDLASPNLSGTTLFSTFNQTDNPNSISTQPDPGALSPEGTSKSPSSSCGQSSISSHSYSSMSELQQLHTTNIAGKKDSTTAGEDSAVVALKRIRSEAELKSLNQDKAKLLPRSLSQETLGEHPKNQYQRPLLKTSSKVDAHRVKVTYGDEKTRFRMPKNWGYEDLLQEIGGRFNVSDMKKFDVKYLDDDCEWVLLTCDADLEECIDVCQSSESGTIKLSLQTSTHSMRSSLEFR

SEQ ID NO: 145 - protein, 822 aa, Phaseolus vulgaris
MEYGALVQNGACGSFSDIFAPETDFMDELFAEGCWVETRVGCGGSYLNCGTEPSKSNSCMEIIFEEESEAESLMVGKRWWIGPRANNPGPSSSVKERLVVAVGYLKEYAKNSNMVIQVWVPARRGCAVGIHQDSYTTLDYTNITNNNNGDATRVFQFQEEWLSDHWTPNIRFLRTHDYSRVQQYDLRAGSLSLPVFQRGSGICLGVVEILLPNNVNPDLHNLQGVDFRSYSLQNFIPPAMTVKGFDELYQGALNEIVEVLTCVCKAHELPLALTWAPCIQQGKSGCGHSNEENYVSTVDPASFVADVDVLGFLDACSEYHLLGGQGVVGTAFTTAKPCFANDITAFTKAEYPLAHYANMFGLHAAVAIPLRSVSADFVLEFFLPKDCHDTQDQKQMLNSLSMLVQQACRSLHVVMDKEEEEELVVHHHHHPHDSKEMESSSWIAHMMEAQQKGKGVSVSLEYLQEPKQEFKVTTNCSEQVFSELEGTGSVGVGVGGRRGGRKSGDKRRTKAEKTISLPVLRQYFAGSLKDAAKSIGVCPTTLKRICRQHGITRWPSRKIKKVGHSLRKLQLVIDSVQGAEGSIQIGSFYTSFPELSSANGVSESTKINNDNSKFYSENGLLSNQGVTTTTSTSPFKSPTSSCSQTCNPTSNQSTAIINNNNNNDDIILMSENQSLIGAPIQVQGEARHFTHHPPIPISIPIQSLDALPPLPQTNSVWNTGSGSFRVKATFGDEKIRFSLQPNWGFRDLQMEIARRFNLNEISNSQLKYLDDAQEWVLLTCDADLEECKDINRSSQSRTVRLFLFHASPLSHSTNAFGGTSPT

SEQ ID NO: 146 - protein, 725 aa, Phaseolus vulgaris
MEYGGGFGSLWECGSAWEEDSIEEVLVEGCWVEASGVGSCEGEYMGSSEAEMEMEVMRKRWWIGPEANSSVKERLVVAVGYIRECTKNSNVVIQVWVPLRSGLVGGPGNNLRRNHPDEWVSVEMNMNMNMNMNSARDVSLRFYRSHEYPRVPYYVDVPGSLALPVLERGTHTCLGVILILMPPCDTINYCPQVLNNSLLCNSSFQVFEEVYEAAVNEMAEVMKCVCRAQNVALALTWAPCCIQQGGKCGYGHSTETHFSTVERACFVGEAQALPFKEACSQHHLLRGQGIVGTAFTTSKPCFAVDIAAFSRAQYPLAHHANIFGLHAAVAIPLRTLYADFVVEFFLPKDCHDREHQNHFLNSISLLLQQSCRNLHVVMGDEFTLPPPPPPPPPPPQQYLSNKEEMVVSEKLESQWQAEACGSWIAHMMEAQAQEQKGKGVCVSLEYLEEAKEEFKVTGKCRWESGGGGAYEAADLHEQQVFGDESQTQTQSFGGRRGRKSGEKRRTKAEKTISLPVLRQYFAGSLKDAAKSIGVCPTTLKRICRQHGITRWPSRKIKKVGHSLKKLQLVIDSVQGAEGAIKIGSFYNSFPELSSATSHSSIPNNSSSFYGHSPPSSSSPSTAPPQHQHFSQTSCTAAPLRVKASFGDEKIRFSLQPKWGFRELEVEIGRRFNVKDLGKVVVKYLDDEGEWVVLACDGDLEECKDLHTTYESRTIRLALFQPSSSP

SEQ ID NO: 147 - protein, 922 aa, Pisum sativum
MEYGGGIVDDGGVFGTMVGGDQGDIIEELLGEGCWIEASENNMMAMQQTASPPQQHYIGNNIPIGMGEGDHFNHHQVDQESGFVVGKRWWIGPRGSQGPSTSVKERLVVAVGYLKEYTKNSSNNVLIQIWVPALRRRSAIHYLQQDSSSSVPVSVNPNMNVHVRFFRSHEYPRHQQQQQQYGSLLALPVFERGSGTCLGVIEFVIANQNLINYRPQLDHLSNALEAVDFRSSHNMNIQPAVKVIFEELYEAAVNEIVEVLASVCKTHNLPLALTWAPCIQQQGGGKGTTGGGGCSVSVTVPTDQMNNNNHMMMSCISTVDSACYVGDMEVLGFQEACSEYHLFNGQGIVGTAFTTTKPCFAIDITAFSKAEYPLAHHADMFGLHAAVAIPLRSVYTGSAADFVLEFFLPKDCRDTEQQKQMLNSLSLVVQQACRSLHLHVVMEDDNANHHEDQDQFTFPTTTNNYMPSSASDAATTASLSQVDAASGCSTKDTTSSSCSWIAHMMEAQNKGKGVSVSLEYLQEPKEEFKVTTCNWEREGNSVFSEFGQVIQHDQSSNSRASVEAGEESGGGGTGGGRRSSSSSSGRKSGDKRRTKAEKTISLPVLRQYFAGSLKDAAKSIGGCPTTLKRICRQHGITRWPSRKIKKVGHSLKKLQLVIDSVQGAEGAIQIGSFYASFPELSTAAAHGGGGGGDHINNNSFYNSHGDLVTNLKSPPSACSQTHAAGNKSIINGDHHHHHHQHLVMTENLAAPSAVDALMQHASTINIQDYQQLQEDHDTKQLLLHFNNNNNNSNNQTLPPRPTVTWNNNNSSSSGLLERGAFRVKATFADEKIRFSLQAVWCFRDLQLEIARRFNLNDMNNLVLKYLDDEGEWVVLACDSDLEECKDLHTSSHTRTIRLSLFQASPLNNLANSFRNNSSSPSS

SEQ ID NO: 148 - protein, 924 aa, Pisum sativum
MEYGGGIVDDGGVFGTMVGGDQGDIIEELLGEGCWIEASENNMMAMQQTASPPQQHYIGNNIPIGMGEGDHFNHHQVDQESGFVVGKRWWIGPRGSQGPSTSVKERLVVAVGYLKEYTKNSSNNVLIQIWVPALRRRSAIHYLQQDSSSSVPVSVNPNMNVHVRFFRSHEYPRHQQQQQQYGSLLALPVFERGSGTCLGVIEFVIANQNLINYRPQLDHLSNALEAVDFRSSHNMNIQPAVKVVFEELYEAAVNEIVEVLASVCKTHNLPLALTWAPCIQQQGGGKGTTGGGGCSVSVTVPTDQMNNNNHMMMSCISTVDSACYVGDMEVLGFQEACSEYHLFNGQGIVGTAFTTTKPCFAIDITAFSKAEYPLAHHADMFGLHAAVAIPLRSVYTGSAADFVLEFFLPKDCRDTEQQKQMLNSLSLVVQQACRSLHLHVVMEDDNANHHEDQDQFTFPTTTNNYMPSSASDAATTASLSQVDAASGCSTKDTTSSSCSWIAHMMEAQNKGKGVSVSLEYLQEPKEEFKVTTCNWEREGNSVFSEFGQVIQHDQSSNSRASVEAGEESGGGGTGGGRRSSSSSSGRKSGDKRRTKAEKTISLPVLRQYFAGSLKDAAKSIGGPTTLKRICRQHGITRWPSRKIKKVGHSLKKLQLVIDSVQGAEGAIQIGSFYASFPELSTAAAHGGGGGGGDHINNNSFYNSHGDLVTNLKSPPSACSQTHAAGNKSIINGDHHHHHHHQHLVMTENLAAPSAVDALMQHASTINIQDYQQLQEDHDTKQLLLHFNNNNNNNSNNQTLPPRPTVTWNNNNSSSSGLLERGAFRVKATFADEKIRFSLQAVWCFRDLQLEIARRFNLNDMNNLVLKYLDDEGEWVVLACDSDLEECKDLHTSSHTRTIRLSLFQASPLNNLANSFRNNSSSPSS

SEQ ID NO: 149 - protein, 921 aa, Pisum sativum
MEYGGGIVDDGGVFGTMVGGDQGDIIEELLGEGCWIEASENNMMAMQQTASPPQQHYIGNNIPIGMGEGDHFNHHQVDQESGFVVGKRWWIGPRGSQGPSTSVKERLVVAVGYLKEYTKNSSNNVLIQIWVPALRRRSAIHYLQQDSSSSVPVSVNPNMNVHVRFFRSHEYPRHQQQQQQYGSLLALPVFERGSGTCLGVIEFVIANQNLINYRPQLDHLSNALEAVDFRSSHNMNIQPAVKVFEELYEAAVNEIVEVLASVCKTHNLPLALTWAPCIQQQGGGKGTTGGGGCSVSVTVPTDQMNNNNHMMMSCISTVDSACYVGDMEVLGFQEACSEYHLFNGQGIVGTAFTTTKPCFAIDITAFSKAEYPLAHHADMFGLHAAVAIPLRSVYTGSAADFVLEFFLPKDCRDTEQQKQMLNSLSLVVQQACRSLHLHVVMEDDNANHHEDQDQFTFPTTTNNYMPSSASDVATTASLSQVDAASGCSTKDTTSSSCSWIAHMMEAQNKGKGVSVSLEYLQEPKEEFKVTTCNWEREGNSVFSEFGQVIQHDQSSNSRASVEAGEESGGGGTGGGRRSSSSSSGRKSGDKRRTKAEKTISLPVLRQYFAGSLKDAAKSIGVCPTTLKRICRQHGITRWPSRKIKKVGHSLKKLQLVIDSVQGAEGAIQIGSFYASFPELSTAAAHGGGGGGDHINNNSFYNSHGDLVTNLKSPPSACSQTHAAGNKSIVNGDHHHHHHQHLVMTENLAAPSAVDALMQHASTINIQDYQQLQEDHDTKQLLLHFNNNNNNSNNQTLPPRPTVTWNNNNSSSSGLLERGAFRVKATFADEKIRFSLQAVWCFRDLQLEIARRFNLNDMNNLVLKYLDDEGEWVVLACDSDLEECKDLHTSSHTRTIRLSLFQASPLNNLANSFRNNSSSPSS

SEQ ID NO: 150 - protein, 924 aa, Pisum sativum
MEYGGGIVDDGGVFGTMVGGDQGDIIEELLGEGCWIEASENNMMAMQQTASPPQQHYIGNNIPIGMGEGDHFNHHQVDQESGFVVGKRWWIGPRGSQGPSTSVKERLVVAVGYLKEYTKNSSNNVLIQIWVPALRRRSAIHYLQQDSSSSVPVSVNPNMNVHVRFFRSHEYPRHQQQQQQYGSLLALPVFERGSGTCLGVIEFVIANQNLINYRPQLDHLSNALEAVDFRSSHNMNIQPAVKVFEELYEAAVNEIVEVLASVCKTHNLPLALTWAPCIQQQGGGKGTTGGGGCSVSVTVPTDQMNNNNHMMMSCISTVDSACYVGDMEVLGFQEACSEYHLFNGQGIVGTAFTTTKPCFAIDITAFSKAEYPLAHHADMFGLHAAVAIPLRSVYTGSAADFVLEFFLPKDCRDTEQQKQMLNSLSLVVQQACRSLHLHVVMEDDNANHHEDQDQFTFPTTTNNYMPSSASDAATTASLSQVDAASGCSTKDTTSSSCSWIAHMMEAQNKGKGVSVSLEYLQEPKEEFKVTTCNWEREGNSVFSEFGQVIQHDQSSNSRASVEAGEESGGGGTGGGRRSSSSSSGRKSGDKRRTKAEKTISLPVLRQYFAGSLKDAAKSIGVCPTTLKRICRQHGITRWPSRKIKKVGHSLKKLQLVIDSVQGAEGAIQIGSFYASFPELSTAAAHGGGGGGGDHINNNSFYNSHGDLVTNLKSPPSACSQTHAAGNKSIINGDHHHHHHHQHLVMTENLAAPSAVDALMQHASTINIQDYQQLQEDHDTKQLLLHFNNNNNNNSNNQTLPPRPTVTWNNNNSSSSGLLERGAFRVKATFADEKIRFSLQAVWCFRDLQLEIARRFNLNDMNNLVLKYLDDEGEWVVLACDSDLEECKDLHTSSHTRTIRLSLFQASPLNNLANSFRNNSSSPSS

SEQ ID NO: 151 - protein, 922 aa, Populus trichocarpa
MEDGGLSPGTMLGATVDSVSVMDFDYMDELLLEGCWLETTDGSEFLNPSLSNSAAFFDSSFMWPTPEINHGDSASSPSQKGNQEDNQISMFPGNSTLSDIQARSPAGETAVSVAGWDDNATDGSELGKRWWIGPTPNPSVETSVKRRLIKALECIKDLTKNKDVLIQIWVPVNRGGRRVLTTHDQPFSLDPSSEKLASYRDISVKYQFSAEEDSKDSVGLPGRVFLGKVPEWTPDVRFFRSDEYPRVNHAQLYDVRGTLALPVFEQGSRTCLGVIEVVTTSQKIKYRPELESVCKALETVDLRSSEVPSIQNLQACNMSYQAALPEIQKLLRAACETHRLPLAQTWVPCTQQGKGGCRHSNENYYRCVSTVDDACCVADSAIQGFQEACSEHHLLKGQGVAGQAFMTNQPCFSGDVTSYGKTEYPLSHHARMFGLCAAVAIRLRSIYIGTTDFVLEFFLPVNCRDPQEQKKMLNSLSAIIQHVSQTLRVVTDKELVEETDLPFSEVLVPSDGRSSGEETSTVKQSCSERHSRDNSPWTACLSEVQPSGSNISLSQKDKQKVMLREKSSENRENQEDCSLRESIKCGRDSTSAEGSFSSAGTSKTGEKRRAKAEKTITLQVLRQYFAGSLKDAAKSIGVCPTTLKRICRQHGINRWPSRKIKKVGHSLKKLQRVIDSVEGASGTVQIDSFYKNFPELASPTLSRTSPLSTLKSSSHPKPSGMQPEGGTFSSQVTAPKSPSPSCSLGSSSSHSCSSGAIAASEDPVSGENSGNGVLKMVRSNVELHASSPGEQERMPRSQSHKTLAELGSIPPLSKDGSRLSQETDAHRLKVTYGNEIIRLRMSNKWGFKDLLQEIVRRFNIDDIHRFDLKYLDDDSEWVLLTCDDDLEECIAICGSSDNQTIKLLLEVSPRPLGRSSHSSGLS

SEQ ID NO: 152 - protein, 925 aa, Populus trichocarpa
MDDGNGPNFIPDSAFENFSGSSMDLDFMDDLLYEGCWLETADEFNFLQAGTISSSDLNDPRQYFPLFEPNSSNSNVNSHQENYQDQSGSFPVESNELGRRLWIAPTATGPSSPVRDRLMHAIGQVKECTKDRDVLIQIWVPVKKEGKNVLTTIGQPYLLDRKCQSLASYRNVSKDFQFPADEDSKELVGLPGRVFLRELPEWTPDVRFFSGVEYLRKNHAKQFNIRGSLAVPVFEQGSRTCLGVIEVVTTTRDISYRPDLENVCKALEAVDLRSPQDFCPPSLKAKVCQAAAPEISKILESVCKAHRLPLALAWAPCFREGKGGCRHFDESYSYFISLVNSAYFVAERDDWGFYMACSEQYLSFGHGIVGRAFATNKQCLSTDVAAFSKTDYPLSHHAKMFGLHAAIAIPLQSSYAGSADFVLELFLPKDCRNTEEQKQMWDILPITVQQACQSWHVIMDKELEETVNKKMVVASDERFHKDESQKFASSLFKDSSKAESSWIARTVEAQQKGKGVSVSWDHTKEEPREEFKVKSQWGRTQDDTYHKQAFPAFGQFQQNSGPKSSIEAGTDSSSAGRHSLGSIKFGDKRRTKTEKTISLEVLRQHFAGSLKDAAKSIGVCPTTLKRICRQHGITRWPSRKIKKVGHSLKKLQLVIDSVQGAEGAIQMGSFYATFPELTSPNLSGNGGLPSTKTDENFKQLNPQPESGIFSAAPSALKSPSSSCSHSSGSSICCSIGVKQDTTTNNGSVSGDPLMVEDHGDVLKRTHSDAELHALNRDETKLLVRSQSHKTFGDLPSPKTLPPLPKSSSRVIRDGGGFRVKATFGADKIRFTLQPNWGFRDLQQETARRFNLDDISGIDLKYLDDDLEWVLLTCDADLEECRDVYKLSEIHTIKISLHQPAQPHLGSSLESRGPHLGSSLGTGVPF

SEQ ID NO: 153 - protein, 915 aa, Populus trichocarpa
MEDGVLSPGMMLGAAVDSAMDFDYMDELLLEGCWVETTDGSEFLNPSLSNSAALFDPSFMWPSPEMNNGNPASSLSQKGSQEVSHIPLLPGNSPSDIQSRSPVGEIAVSAAGWEYNATEGSELGKRWWIGPAPNPSPGTTVKRRLIKAVECIKDLTKNKDVLIQIWVPVNRGGRRVLTTHDQPFALDPSSERLASYRDISVKYQFSAEKDSKDSVGMPGRVFLGKVPEWTPDVRFFRNDEYPRVNHAQQCDVRGTLALPVFEQGSRTCLGVIEVVTTSQKIKYLPELESVCKALEAVDLRSSEVPSIQNLKACDMSYQAALPEIQKVLRAACETHRLPLAQTWVPCIQQGKGGCRHSNENYYHCVSTVDDACCVGDPAFQGFLEACSEHHLLKGQGVVGEAFMTNQPCFSGDVTLYGKTEYPLSHHARIFGLCAAVAIRLRSMYTGTTDFVLEFFLPVDCRDPQEQKTMLTSLSIIIQRVCQTLRVVTVKELEEETDLPVSEVLVPSDGRSSGEETSTVKESYSERNARDNSPWTACLLKVQQSESNASLSEKDKEKVMCEKSFESRHNQEDYSLRGSTKYGGDSTSAEGSFSSVCKTKPGEKRRAKTEKTITLQVLRQYFAGSLKDAAKSIGVCPTTLKRICRQHGINRWPSRKIKKVSHSLQKLQCVIDSVEGAPGSVQIGSFYENFPELASPNSSRNSSLSTLNPSSHPKPSGIQLEGGTFSSHVAEPKSPSPSCSLSSSSSHSYSSTTQQYPSAITVSASEDPKLGENLGSGVLKKIRSNAELHASILEERKLMLRSQSHTTLTELGNRPPLPKDSSRLSQEMDGHRVKVSFRNDKIRLRMPNNWVFKDLLQEIIRRFNLDDMHRYDLKYLDDDSEWVLLACDDDLEECIDVCGSGDNQTIKLLIEVSPHP

SEQ ID NO: 154 - protein, 904 aa, Populus trichocarpa
MDDHGSSTPNSTFDIFSGNVTNWDFMDEILYQGWFEKDGGFNFLQQGLSTSNVLHDPSLYFPVTGTTNWNSVETSTPFSHPASCRVEAAGLGFEWQMVQRVNPGTSCSVKERVMQAVGYLKNCIQDRDILIQIWLPMEKEGKRVLATIDQPYFVDPSCKSLASYRKVSTAYHFQAEEDAKCSVGFPGRVFLEKLPEWTPDVRLFRSEEYPHRDHAVQHNIRGSLALPLFKQGSETCLGIVEIATTIQKISYRSELQDICKVLQAVDLRSSEDFCSPGVEITIVFLLSQTCNRLNRAAVPEISDIVKSVCKTYSLPLALTWALCSRQGKIGRQQFPERFSSCISTVDSACFLADRGFSGFHMASFEQYLFLGQGIVGRAFTTQKQCFTNDITSFSKKDYPLAHHAKIFGLHAAIAIPLRSISTGLVEFVVELFLPKDCQETEEQKKMWDLLPIVLKQVCRSLQIVMDKELHIGENKSFESSPSKEAPPDESSWIASMLEAQKKGKSCIVTWDYPKEPEEEFKTIIHWDDSAVEIDQKQVISELGRLQQHSRPNINIEGDGVSFAFGGRRSLGSTKAGKKRRTKTEIQTISLGVLRQYFAGSLNDAAQSIGVCPTTLKRICRQHGIKRWPSRKIKKVDHSLRKLQQVIDTVQGAKGAVQIESFYPAFPELSSPKLSNHTSYSSFRRIDNSKHLDSPPDDSCPSGTASKSHSSPCSRSSCSSNCCSGRAQQHAATTITGSSNGNGSLLAETSNGIFKRTCSNELAELHSLNNQGGPDFLVRSQIHKTRTVSDHIHQNELESPPRFGPSLREGGVFGVKAIYGVEKVRLGLQPKWGLRDLQQEIGKRFEIDDFTCIGLKYMDDDGEWVLLTCDSDLEECKEIHRFSQTNTIKISLHKYSSPFGFRGSF

SEQ ID NO: 155 - protein, 793 aa, Populus trichocarpa
MLTETSTPFAHPASCRVEAAGLGFEWQMVQRVNPGTSFSVKERVMQAVGYLKHCIQDRDILIQIWLPMEKEGKRDAKRSVGFPGRVFLEKLPEWTPDVRLFRSEEYPHRDHAVQHNIRGSLALPLFTQGSETCLGIVEIATTIQKISYRPELQDICKVLQAVDLRSSEDFCSPGVETCNRLNRAAVPEISDIVKSVCKTYRLPLALTWALCSRQGKSGRQQFPERFSSCISTVDSACFLADRGFSGFHMASFEQYLFLGQGIVGRAFTTQKQCFTNDITSFSKKDYPLAHHAKIFGLHAAIAIPLRSISTGLVEFVLEFFLPKDCQDTEEQKEMWDLLPISIKQVCWSLQVVMDKELDQGENQSFVSSPSKEPPRDESSWIAWMVEAQKKGKSCCITWDYPKEPKEEFKMITPWDDSEEELDNKQVISELGQLQQNPRPNSCIEGDGVSSAFGGCRSLGSRKTGKKRRTKTAIQTISLEVLRRYFAGSLKDASQSLGVCSTTLKRICRQHGIKRWPSRKINKVGHSLRKLQQVIDTVQGAKGAVQIESFYSAFPELSSPKISSHAPYSSLRSDNSKHLDSPPDDSSPSGTASKSHSSPCSGKSCSSNCCSARAQQHDATTITVSSNGNGALLAETSNGILKRTCSSELAEFHSMNNHGDPDFLVRSQIHKTRTVSGHIHQSELGSPRFAQSLREGGVFGVKAIFGVEKVRLGLQPNWGLRDLQQEIGKRFEIDDFTDIGLNYMDDNGEWVRLTCDGDLEECKEIHIFSQRNTMKISCHDPNLVSMTSNTGATL

SEQ ID NO: 156 - protein, 903 aa, Populus trichocarpa
MDDGNGAFAPDSSFGNFSDAAMDLDFVDELLYDGCCFETVDEFGFLEAGTSASNDLNDPKQYLPFFESNSCNLNVNPCQENYQVATEKNFQSGGFLVEKNELGRRLWIAPTNNARSSTGVRERLMHAIGQLKQCTKDRDLLIQIWVPIKKEGKHVLTTFGQPYLLNPKSQSLASYRNVSKKFQFPAEEDSKELVGLPGRVFLRKLPEWTPDVSYFSWVEYPRKNHAKQFNIRGSFAVPVFEQGSRTCLGVIEVVTTTQDVSYRSELESVCKALEAVDLRSPKDFRPSSLKACKEFCQAAVPEISKILESVCKTHRLPLALTWAPCFRQGKGGCRHFDENYSNCICTVNSACFVAETDNFGFYVACSEQYLSFGQGIVGRAFTTRKQCFSTDVAAFSKTDYPLSHHAKMFELHAAIAIPVQSTYAGPVDFVLEFFFPKDCCNTEEQKRMWDILPITIKQACWSLHVVMDKELEETVNKKMKFASLFKESSEAESSWIARVAEAQQKGKGVCVSWDHRKEENKEEFKVTSHWGKTQDELYHKQAFPEFGKFQQNSVPKGSIESTTDAASAEHHSVGSRKSGDKRRTKTEKTISLQVLRQYFAGSLKDAAKSIGVCPTTLKRICRKHGITRWPSRKIKKVGHSLKKLQLVIDSVQGAEGAIQIGSFYTTFPELTSPNFSANGGFPSSKANDDSNKSNHRPENGIFSAAASASKSPSSSSSQSSGSSICFSGYPLLVEDPGGVLKRTHSDAALHALNRDKSEPLIRSQSFKTFGDLPNPETLPPLPKSSSQIIRDRSGFRVKATFGADKIRFTLQPNWGFRDLQQEIARRFNIDDICRIDLKYLDDDQEWVLLTCDADLEECKDVYKLSESHTIKMSLNQPSQPHLGSSLGSVGPNLVSLLGGGGPF

SEQ ID NO: 157 - protein, 935 aa, Populus trichocarpa
MDEHSSSSPNSTFGIFSGNPMNWDLMDEILYQGWAENDGEFSFLQQGPSISNVLYDHPSLYMPFMGSNNLSIASNQQNYQEETERHCHGNPPLDYPKSMELLQTEPQVEDSVDTSTSLLHTTSYRVEAAGLGVEWQMVPRVNPLTSFSVKERAMQAIRYLKNCIQYKDSLIQIWLPVEKEGKKVLATIDQPYFVNPSCKSLASYRNVSVAYHFQVEGDAKFSVGFPGRVFLEKLPEWTPDVRLFRSEEYPRRDHAVQHNIRGSLALPLFKQGSETCLGIVEIVTTTEKITYRPELEDIRKALKAVDLRSSEDFCSPGVKTCNGLNQVAVPELSEIVKSVCKTYGLPLALTWALCSRQGKGGRQQFAEKSGACISTVDSACFLADRDFSGFHMASFEQYIFLGQGIVGRAFTTQKQCFANDITSFSKKDYPLAHHAKIFGLHAAIAIPMRSIATGLVEFVLELFLPIDCKDTEEQKKMWDLLPIAIQQVCWSLQVVMDKGLGNGENQSFESSPSKQPPLDESSWISRMVEAQKKSKSFCVTWGYPKEPKEEFKMITHWDESAVELDHKQVISELGQLQQNSRTNSNTEGDGVSSAFGRHLSFGSRKTGKKRRTKTDIQTISLEVLRQYFAGSLKDAAQSLSVCPTTLKRICRQHGITRWPSRKIKKVDHSLRKLQQVIDTVQGAKGAIQIESFYSAFPELSSTKLSSHAPSSSFRRSDSSKHFDSPPDDTIFSGTTSKSHSSPCSRSSCSSNCCSARAQQHAATVITGSSNGNGGLPAETSNGVLKRTSSSELAEFYSLNNEVEPDFLSRSYIHKTRTINEQIHQSLLETPPQFGQSRRGGDVFRVKAIFGVEKVRLFLQPNWGLRELQQEIGKRFKIDDFTGIGLKYMDDDGEWIRLTRDDDLEECKETHKFCQSNTIKLSLYKYSTAFGCRGSC

SEQ ID NO: 158 - protein, 854 aa, Prunus avium
MSPHQQIYQEENTDGSYPESHSSFAVEGNTEADRRLWIGPRVNPGPSSSMKERLMLAIGYLKECTKGRDVLIQIWVPIKRGGRQYLTTRDQPFSLDPNCKSLAGYRNVSKDYQFITEEDSAESVGLPGRAFLGKLPEWTPDVRFFRSYEYPRIDYAQQYDVRGSLALPIFENGSGTCLGVVEIVMTPQKVNYRPELEYVCQALEAVDLRSSQNFCPHCVKTCDELYQAALTEIVEVLASVCKTHRLPLAQTWAPCIQQGKGGCRHSDENYAHCVSTVDAACFVADLDILGLHEACSEHHLCRGQGIVGAAFTTNKPCFATDIKAFSKTEYPLSHHARMFGLHAAVAIPFRSVCTGPADFVLEFFLPKDCQDPEEQKQMLNSLCIVIQQACWSLHVDVDKELEEEIMFPIREPVIGSDGGLHEEETQRLISSPTEEPSGKESSWIAHMIEAQQKGKGVSVSLDYQTEEPKEEFKVTTHWDNTQGSLHSGQVFSEFGQLHQSSGSHGNVEGGADSYSFGGRRTSGGRKAGEKRRTKTEKTISLPVLRQYFAGSLKDAAKSIGVCPTTLKRICRQNGITRWPSRKIKMVGHSLKKLQLVIDSVQGAEGAIHIGSFYSSFPELNSPKFPGSGQYSSMNMSDHSKQVNPLQHDQSGLYSHGTTTKSPSSSCSQTSGPSVCVAGAQQHTVTINTLSSGDALMTEDPVGVLKRACSDADLHASFQEETKLIYRSESHKSFSDNLSYENLPPLPGSSGRSLRDGLQSKSYFGMKKIRFSMLPNCSFRDLQLEIARRFNLDDISRTEIKYLDDDREWVLLNCDADLEECMEIYSSSPGRTVRLCLQQVFHPNLAASFGNSSPS

SEQ ID NO: 159 - protein, 913 aa, Prunus avium
MDDDVLSPATMMGAQPDSATDLDFMDELFLEGCWLETTDGPEFPNQSHANSGAHLNPSVFWHTLEANGNLTMNPSENSNQEVIQTPFFKQLHKGPVNPQFPSQNMIDVDGYSGHSADPTIKSYELNRRWWIGPLENQGPASSVMERLTRALVCIRDVMRDKNVLVQVWVPVNKGGRNVLTTNDDLFSLNSSCPRLSKYRDISVNYQFSTGEDSTELVKGLPGRVFSGQVPEWTPDVRFFRSDEYPRVDYAQRYDVRGTLALPIFEQGSRTCLGVIEVVTTTQKTKYQLELESVCKALEDVDLQSSRNWRTQNIKQGCVKPYQAALPEIQEVLKSACETHKLPLAQTWVSCIQQGKDGCRHSDDNYIHCVSTLDHAFHVTDPYIEDFHEACSEHHLLKGQGIVGKAFMTNQPCFSDDITSCVKTEYPLSHHARMFGLHAAVAIRLRSMKTGSTDYVLEFFLPVECRDPEEQKKMLNSLSLIIQQICRSLRVVTDKELEEESDFPVSEMLVSSDPRPSGIASFTEVQLSGNDVSIFPMENPREVLGVKSSKLRQHQPESNLKGGVECGTECSTLGEGSFSSVGVSKTREKRRTKAEKAITLEVLRKYFSGSLKDAANSIGVCSTTLKRICRQHGIKRWPSRKIKKVGHSLQKLQLVIDSVEGASGAFQINSFYTNFPELTSPNLSGTSPFSTSKLSDQPKPTNLSPEGGVVSPQATASKSPSSSCSQSSSSSQCCSSRTQQHPPTCNVTGDDDPIVGDNSGDGVLKRVRSEAELHAFGQDRTQLLPRSQSHKILNELQKLQPIPPSLKNNGVAQEGEVQRVKVAYGDEKTRFRMRSDWRYEDLVQEIAKRFSIEDMSIFDIKYLDDDSEWVLLTCDADLEECIDVCRSSQSHTIKLSLHLSRHHLRRFIGINGPS

SEQ ID NO: 160 - protein, 912 aa, Prunus avium
MDDDVLSPATMMGAQPDSATDLDFMDELFLEGCWLETTDGPEFPNQSHANSGAHLNPSVFWHTLEANGNLTMNPSENSNQEVIQTPFFKQLHKGPVNPQFPSQNMIDVDGYSGHSADPTIKSYELNRRWWIGPLENQGPASSVMERLTRALVCIRDVMRDKNVLVQVWVPVNKGGRNVLTTNDDLFSLNSSCPRLSKYRDISVNYQFSTGEDSTELVKGLPGRVFSGQVPEWTPDVRFFRSDEYPRVDYAQRYDVRGTLALPIFEQGSRTCLGVIEVVTTTQKTKYQLELESVCKALEDVDLQSSRNWRTQNIKGCVKPYQAALPEIQEVLKSACETHKLPLAQTWVSCIQQGKDGCRHSDDNYIHCVSTLDHAFHVTDPYIEDFHEACSEHHLLKGQGIVGKAFMTNQPCFSDDITSCVKTEYPLSHHARMFGLHAAVAIRLRSMKTGSTDYVLEFFLPVECRDPEEQKKMLNSLSLIIQQICRSLRVVTDKELEEESDFPVSEMLVSSDPRPSGIASFTEVQLSGNDVSIFPMENPREVLGVKSSKLRQHQPESNLKGGVECGTECSTLGEGSFSSVGVSKTREKRRTKAEKAITLEVLRKYFSGSLKDAANSIGVCSTTLKRICRQHGIKRWPSRKIKKVGHSLQKLQLVIDSVEGASGAFQINSFYTNFPELTSPNLSGTSPFSTSKLSDQPKPTNLSPEGGVVSPQATASKSPSSSCSQSSSSSQCCSSRTQQHPPTCNVTGDDDPIVGDNSGDGVLKRVRSEAELHAFGQDRTQLLPRSQSHKILNELQKLQPIPPSLKNNGVAQEGEVQRVKVAYGDEKTRFRMRSDWRYEDLVQEIAKRFSIEDMSIFDIKYLDDDSEWVLLTCDADLEECIDVCRSSQSHTIKLSLHLSRHHLRRFIGINGPS

SEQ ID NO: 161 - protein, 942 aa, Prunus avium
MDYGALMPNSSSYGTLSDTTMEVDFMDEILFEGCWLQSNAGFNLLQQQQQQLVCPPISQDLTDHPSHYFPPYDHQSNSTVAHLSMSPHQQIYQEENTDGSYPESHSSFVVEGNTEAGRRLWIGPRANPGPSSSVKERLMLAIGYVKECTKGRDVLIQIWVPIKRGGRQYLTTHDQPLSLDPNCKSLAGYRNVSKDYQFITEEDSAESVGLPSRAFLGKLLEWTPDVCFFRSYEYPRIDYAQQYDVRGSLALPIFENGSGTCLGVFEIVMTPQKVNYRPELEYVCQALETVDLRSSQNFWPLCVKTRDELFQAALTEIVEVLASVCKTHRLPLAQTWALCIQQGKGGCRHSDENYAHCVSTVDAACFVADLDILGFHEACSEHHLFQGQGIVGTAFTINKPCFATDIKAFSKTEYPLSHHARMFGLHSAVAIPFRSVYTGPADLVLEFFLPKDCQDPEEQKQMLNSLCIVIQQACRSLHVNVDKELEEEIMFPIREPVIGSDGGLHKEETQRLISSPTEEQSGKESSWIAHMIEAQQKGKGVSVSLDYQTEEPKEEFKVTTHWGNTQGSLHSGQVFSEFGQLHQSSGSHGNVEGGADSYSFGGRRTSGGRKAGEKRRTKTEKTISLPVLQQYFAGSLKDAAKSIGVCPTTLKRICRQHGITRWPSRKIKMVGHSLKKLQLVIDSVQGAEGAIDIGSFYSSFPELNSPKFPGSGQYSSMNMSDHSKQVNPQQHDQSGLYSHVTTTKSPSSSCSQTSGPSVCVAGAQQHTITINTLGSGDALMTEDPVGVLKRACSDADLHASFQEETKLIHRSQSHKSFSDNLSYENLPPLPLPGSSGRSLWDGGIYRVKATFGMKKIRFSMLPNCSFRDLQLEIARRFNLDDISRTGIKYLDDDCKWVLLNCDADPEECMELYSSSPGRTVRLCLQQVFHPNLAASFGNRSPS

SEQ ID NO: 162 - protein, 911 aa, Prunus avium
MDDDVLSPATMMGAQPDSTTDLDFMDELFLEGCWLETTDGPEFPNQSHANSGAHLNSSVFWHTLEANGNLTMNPSENSNQEVIQTPFFKQLHEGPVNPQFPSQNMIDVDGYSGHSADPTIKSYELNRRWWIGPLGNQGPASSVMERLTRALVCIRDVMRDKNVLVQVWVPVNKGGRNVLTTNDDLFSLDSSCPRLSKYRDISVNYQFSTGEDSTELVKGLPGRVFSGQVPEWTPDVRFFRSDEYPRVDYAQRYDVRGTLALPIFEQGSSTCLGVIEVVTTTQKIKYQLELESVCKALEAVDLQSSRNWSTQNVKGCVKPYQAALPEIREVLRSACETHKLPLAQTWVSCIQQGKDGCRHSDDNYVHCVSTVDHAFHVTDPYIEGFHEACSEHHLLKGQGIVGKAFMTNQPCFSDDITSCVKTEYPLSHHARMFGLHAAVAIRLRSMKTGSTDFVLEFFLPVECRDPEEQKKMLNSLSIIIQQICRSLRVVTDKELEEESDFPVSEMIVSSDPRPSGIASFTEVQLSGNDVSIFPMENPREVLGVKSSKLRQHQPDSNLKVGVKCGRECSALGEGSFSSVGVSKTREKRRTRAEKAITLEVLRKYFSGSLKDAANSIGVCSTTLKRICRQHGIKRWPSRKIKKVGHSLQKLQLVIDSVEGASGAFQINSFYTNFPELTSPNLSGTSPFSTSKLSDQPKPTNLSPEGGVVSPQATASKSPSSSCSQSSSSSQCCSSRTQQHRPTCNVTGDDDPIVGDNSGDGVLKRVRSEAELHAFGQDRTQLLPRSQSHKILNELQKLQPIPPSLKNNGVAQEREVRRVKVAYGDEKTRFRMQNDWRYEDLVQEIAKRFSIEDMSKFYIKYLDDDSEWVLLTCDADLEECIDVCRSSQSNTIKLSLHLSRHHLERFIGTGGP

SEQ ID NO: 163 - protein, 912 aa, Prunus avium
MDDDVLSPATMMGAQPDSTTDLDFMDELFLEGCWLETTDGPEFPNQSHANSGAHLNSSVFWHTLEANGNLTMNPSENSNQEVIQTPFFKQLHEGPVNPQFPSQNMIDVDGYSGHSADPTIKSYELNRRWWIGPLGNQGPASSVMERLTRALVCIRDVMRDKNVLVQVWVPVNKGGRNVLTTNDDLFSLDSSCPRLSKYRDISVNYQFSTGEDSTELVKGLPGRVFSGQVPEWTPDVRFFRSDEYPRVDYAQRYDVRGTLALPIFEQGSSTCLGVIEVVTTTQKIKYQLELESVCKALEAVDLQSSRNWSTQNVKQGCVKPYQAALPEIREVLRSACETHKLPLAQTWVSCIQQGKDGCRHSDDNYVHCVSTVDHAFHVTDPYIEGFHEACSEHHLLKGQGIVGKAFMTNQPCFSDDITSCVKTEYPLSHHARMFGLHAAVAIRLRSMKTGSTDFVLEFFLPVECRDPEEQKKMLNSLSIIIQQICRSLRVVTDKELEEESDFPVSEMIVSSDPRPSGIASFTEVQLSGNDVSIFPMENPREVLGVKSSKLRQHQPDSNLKVGVKCGRECSALGEGSFSSVGVSKTREKRRTRAEKAITLEVLRKYFSGSLKDAANSIGVCSTTLKRICRQHGIKRWPSRKIKKVGHSLQKLQLVIDSVEGASGAFQINSFYTNFPELTSPNLSGTSPFSTSKLSDQPKPTNLSPEGGVVSPQATASKSPSSSCSQSSSSSQCCSSRTQQHRPTCNVTGDDDPIVGDNSGDGVLKRVRSEAELHAFGQDRTQLLPRSQSHKILNELQKLQPIPPSLKNNGVAQEREVRRVKVAYGDEKTRFRMQNDWRYEDLVQEIAKRFSIEDMSKFYIKYLDDDSEWVLLTCDADLEECIDVCRSSQSNTIKLSLHLSRHHLERFIGTGGP

SEQ ID NO: 164 - protein, 755 aa, Prunus persica
MLAIGYLKECTKGRDVLIQIWVPIKRGGRQYLTTHDQPFSLDPNSKSLAGYRNVSKDYQFITEEDSAESVGLPSRAFLGKLLEWTPDVRFFRSYEYPRIDYAQQYDVRDSLALPIFENGSGTCLGVVEIVMAPQKVNDRPELEYVCQALETHDELYQAALTEIVEVLASVCKTHRLPLAQTWAPCIQQGKGGCRHSDENYARCVSIVDAACFVADLDILGFHEACSEHHLFQGQGIVGTAFTINKPCFATDIKAFSKTEYPLSHHARMFGLHAAVAIPFRSVYTGPADLVLEFFLPKDCQDPEEQKQMLNSLCIVIQQACQSLHMNVDKELKEEIMFPIREPVIGSDGGLHTEETQRLISSPPEEPSGKESSWIAHMIEAQQKGKGVSVSLDYQTEEPKEEFKVTTHWGNTQGSLHSGQVFSEFGQLHQSSGSHGNVEGGADSYSFGGHRTSGGRKAGEKRRTKTEKRISLPVLRQYFAGSLKDASKSIGVCPTTLKRICRQHGITRWPSRKIKKVGHSLKKLQLVIDSVQGAEGAIHIGSFYSSFPELNFPKFPGSGQYSSMNMSDHSKQVNPQQHDQSGLYSHVTTTKSPSSSCSQTSGPNVCVAGAQQHTITINTLGSGDSLMTEDPVGVLKRACGDADLHASFQEETKLIHRSQSHKSFSDNLSYENLSPLPGSSGQSLRDGGVYRVKATFRDEKKKHLDDDCEWVLLNCDADLEECMEIYSSSPGRTVRLCLQQVFHPNLAASFGNSRPS

SEQ ID NO: 165 - protein, 645 aa, Prunus persica
MDDDVLSPATMMGAQPDSATDLDFMDELFLEGCWLETTDGPEFPNQSHANSSAHINPSVFWHMLEANGNLTMNPSENSNQEVIQTPFFKQLHEGPVNPQFPSQNMIDVDGYSGHSADPTIKSYELNRRWWIGPLGNQGPASSVMERLTRALVCIREVMRDKNVLVQVWVPVNKGGRNVLTTNDDLFSLDSSCPRLSKYRDISVNYQFSTGEDSTELVKGLPGRVFSGQVPEWTPDVRFFRSDEYPRVDYAQRYDVRGTLALPIFEQGSRTCLGVIEVVTTTQKIKYQLELESVCKALEAVDLQSSRNWSTQNVKGCVKPYQAALPEIQEVLRCACETHKLPLAQTWVSCIQQGKDGCRHSDDNYVHCVSTVDHAFHVTDPYIEGFYEACSEHHLLKGQGIVGKAFMTNQPCFSDDITSCVKTEYPLSHHARMFGLHAAVAIRLRSMKTGSTDFVLEFFLPVECRDPEEQKKMLNSLSLIIQQICRSLRVVTDKELEEESDFPVSEMIVSSDPRPSGIASFTEVHLSGNDVSIFPMENPREVLGVKSSKLRQHQPDSNLKVGVKCGRECSALGEGSFSSVGVSKTREKRRTKAEKAITLEVLRKYFSGSLKDAANSIGGYADNTGLNVGHLEKLRRLVTLYRNSNL

SEQ ID NO: 166 - protein, 865 aa, Prunus persica
MDYGALMPNSSSCGTLYDTTMEGDFMDEILFEGCWLQSNAGFNLLQQQQQPATLRQAGGCGLVPGQNPGPSSSVKERLMLAIGYLKECTKGRDVLIQIWVPIKRGGRQYLTTHDQPFSLDPNSKSLAGYRNVSKDYQFITEEDSAESVGLPSRAFLGKLLEWTPDVRFFRSYEYPRIDYAQQYDVRDSLALPIFENGSGTCLGVVEIVMAPQKVNDRPELEYVCQALEAVDLRSSQNFWPLCVKTHDELYQAALTEIVEVLASVCKTHRLPLAQTWAPCIQQGKGGCRHSDENYARCVSIVDAACFVADLDILGFHEACSEHHLFQGQGIVGTAFTINKPCFATDIKAFSKTEYPLSHHARMFGLHAAVAIPFRSVYTGPADLVLEFFLPKDCQDPEEQKQMLNSLCIVIQQACQSLHMNVDKELKEEIMFPIREPVIGSDGGLHTEETQRLISSPPEEPSGKESSWIAHMIEAQQKGKGVSVSLDYQTEEPKEEFKVTTHWGNTQGSLHSGQVFSEFGQLHQSSGSHGNVEGGADSYSFGGHRTSGGRKAGEKRRTKTEKRISLPVLRQYFAGSLKDASKSIGVCPTTLKRICRQHGITRWPSRKIKKVGHSLKKLQLVIDSVQGAEGAIHIGSFYSSFPELNFPKFPGSGQYSSMNMSDHSKQVNPQQHDQSGLYSHVTTTKSPSSSCSQTSGPNVCVAGAQQHTITINTLGSGDSLMTEDPVGVLKRACGDADLHASFQEETKLIHRSQSHKSFSDNLSYENLSPLPGSSGQSLRDGGVYRVKATFRDEKKKIARRFNLDDISRTGIKHLDDDCEWVLLNCDADLEECMEIYSSSPGRTVRLCLQQVFHPNLAASFGNSRPS

SEQ ID NO: 167 - protein, 912 aa, Prunus persica
MDDDVLSPATMMGAQPDSATDLDFMDELFLEGCWLETTDGPEFPNQSHANSSAHINPSVFWHMLEANGNLTMNPSENSNQEVIQTPFFKQLHEGPVNPQFPSQNMIDVDGYSGHSADPTIKSYELNRRWWIGPLGNQGPASSVMERLTRALVCIREVMRDKNVLVQVWVPVNKGGRNVLTTNDDLFSLDSSCPRLSKYRDISVNYQFSTGEDSTELVKGLPGRVFSGQVPEWTPDVRFFRSDEYPRVDYAQRYDVRGTLALPIFEQGSRTCLGVIEVVTTTQKIKYQLELESVCKALEAVDLQSSRNWSTQNVKGCVKPYQAALPEIQEVLRCACETHKLPLAQTWVSCIQQGKDGCRHSDDNYVHCVSTVDHAFHVTDPYIEGFYEACSEHHLLKGQGIVGKAFMTNQPCFSDDITSCVKTEYPLSHHARMFGLHAAVAIRLRSMKTGSTDFVLEFFLPVECRDPEEQKKMLNSLSLIIQQICRSLRVVTDKELEEESDFPVSEMIVSSDPRPSGIASFTEVHLSGNDVSIFPMENPREVLGVKSSKLRQHQPDSNLKVGVKCGRECSALGEGSFSSVGVSKTREKRRTKAEKAITLEVLRKYFSGSLKDAANSIGVCSTTLKRICRQHGIKRWPSRKIKKVGHSLQKLQLVIDSVEGASGAFQINSFYTNFPELTSPNLSGTSPFSTSKLSDQPMPTNLSPEGGVVSPQATTSKSPSSSCSQSSSSSQCCSSRTQQHRPTCNVTGGDDPIVGDNSGDGVLKRVRSEAELHAFGQDRTQLLPRSQSHKILNELQKLQPIPPSLKNNGVAQEGEVQRVKVAYGDEKTRFRMQSDWRYEDLVQEIAKRFSVEDMSKFYIKYLDDDSEWVLLTCDADLEECIDVCRSSQSNTIKLSLHLSRHHLERFIGTGGPS

SEQ ID NO: 168 - protein, 935 aa, Prunus persica
MDYGALMPNSSSCGTLYDTTMEGDFMDEILFEGCWLQSNAGFNLLQQQQQPVCPPISQALTDHPSHYFPPYDHQSNSTVAHLSTSPHQQIYQEENTDGSYPESHSSFVVEGNTEAGRRLWIGPRANPGPSSSVKERLMLAIGYLKECTKGRDVLIQIWVPIKRGGRQYLTTHDQPFSLDPNSKSLAGYRNVSKDYQFITEEDSAESVGLPSRAFLGKLLEWTPDVRFFRSYEYPRIDYAQQYDVRDSLALPIFENGSGTCLGVVEIVMAPQKVNDRPELEYVCQALEAVDLRSSQNFWPLCVKLYQAALTEIVEVLASVCKTHRLPLAQTWAPCIQQGKGGCRHSDENYARCVSIVDAACFVADLDILGFHEACSEHHLFQGQGIVGTAFTINKPCFATDIKAFSKTEYPLSHHARMFGLHAAVAIPFRSVYTGPADLVLEFFLPKDCQDPEEQKQMLNSLCIVIQQACQSLHMNVDKELKEEIMFPIREPVIGSDGGLHTEETQRLISSPPEEPSGKESSWIAHMIEAQQKGKGVSVSLDYQTEEPKEEFKVTTHWGNTQGSLHSGQVFSEFGQLHQSSGSHGNVEGGADSYSFGGHRTSGGRKAGEKRRTKTEKRISLPVLRQYFAGSLKDASKSIGVCPTTLKRICRQHGITRWPSRKIKKVGHSLKKLQLVIDSVQGAEGAIHIGSFYSSFPELNFPKFPGSGQYSSMNMSDHSKQVNPQQHDQSGLYSHVTTTKSPSSSCSQTSGPNVCVAGAQQHTITINTLGSGDSLMTEDPVGVLKRACGDADLHASFQEETKLIHRSQSHKSFSDNLSYENLSPLPGSSGQSLRDGGVYRVKATFRDEKKRFSMLPNCSFRDLQLEIARRFNLDDISRTGIKHLDDDCEWVLLNCDADLEECMEIYSSSPGRTVRLCLQQVFHPNLAASFGNSRPS

SEQ ID NO: 169 - protein, 913 aa, Prunus persica
MDDDVLSPATMMGAQPDSATDLDFMDELFLEGCWLETTDGPEFPNQSHANSSAHINPSVFWHMLEANGNLTMNPSENSNQEVIQTPFFKQLHEGPVNPQFPSQNMIDVDGYSGHSADPTIKSYELNRRWWIGPLGNQGPASSVMERLTRALVCIREVMRDKNVLVQVWVPVNKGGRNVLTTNDDLFSLDSSCPRLSKYRDISVNYQFSTGEDSTELVKGLPGRVFSGQVPEWTPDVRFFRSDEYPRVDYAQRYDVRGTLALPIFEQGSRTCLGVIEVVTTTQKIKYQLELESVCKALEAVDLQSSRNWSTQNVKQGCVKPYQAALPEIQEVLRCACETHKLPLAQTWVSCIQQGKDGCRHSDDNYVHCVSTVDHAFHVTDPYIEGFYEACSEHHLLKGQGIVGKAFMTNQPCFSDDITSCVKTEYPLSHHARMFGLHAAVAIRLRSMKTGSTDFVLEFFLPVECRDPEEQKKMLNSLSLIIQQICRSLRVVTDKELEEESDFPVSEMIVSSDPRPSGIASFTEVHLSGNDVSIFPMENPREVLGVKSSKLRQHQPDSNLKVGVKCGRECSALGEGSFSSVGVSKTREKRRTKAEKAITLEVLRKYFSGSLKDAANSIGVCSTTLKRICRQHGIKRWPSRKIKKVGHSLQKLQLVIDSVEGASGAFQINSFYTNFPELTSPNLSGTSPFSTSKLSDQPMPTNLSPEGGVVSPQATTSKSPSSSCSQSSSSSQCCSSRTQQHRPTCNVTGGDDPIVGDNSGDGVLKRVRSEAELHAFGQDRTQLLPRSQSHKILNELQKLQPIPPSLKNNGVAQEGEVQRVKVAYGDEKTRFRMQSDWRYEDLVQEIAKRFSVEDMSKFYIKYLDDDSEWVLLTCDADLEECIDVCRSSQSNTIKLSLHLSRHHLERFIGTGGPS

SEQ ID NO: 170 - protein, 573 aa, Prunus yedoensis
  var. nudiflora
MDNDVLSPATMMGAQPDSATDLDFMDELFLEGCWLETTDGSEFPNQSHANSGAHLNPSVFWHTLEANGNLTMNPSENSNQDVIQTPFFKQLHEGPVNPQFPSQNMIDVDGYSGHSADPTIKNYELNRRWWIGPLENQGPASSVMERLTRALVCIRDVMRDKNVLVQVWVPVNKGDRNVLTTSDGLYSLDSSCPRLSKYRDISANYQFSTGEDSTELVKGLPGRVFSGQVPEWTPDVRFFRSDEHPQVEYAQRYDVRGTLALPIFEQGSRTCLGVIEVVTTTQKIKYQLELESVCKALEDVDLQSSRNWRTQNVKGCVKPYQAALPEIQEVLRSACETHKLPLAQTWVSCIQQGKDGCRHSDDNYVHCVSTVDHVFHVTDPYIEGFHEACSEHHLLKGQGIVGKAFMTNQPCFTDDITSCVKTEYPLSHHARMFGLHAAVAIRLRSMKTDSTDFVLEFFLPVECRDPEEQKEMLNSLSLIIQQICRSLRVVTDKELEEESDFPFSEMIVSSDPRPSDIASFTEVQLSGNDVSIFPMENPRVGAGCEILKVKATSTRFPKGWCRVWERVFYFGRG

SEQ ID NO: 171 - protein, 837 aa, Prunus yedoensis
  var. nudiflora
MDDDVLSPATMMGTQPDSATDLDFMDELFLEGCWLETTDGPEFPNQSHANSGAHLNPSVFWHTLEANGNLTMNPSENSNQEVIQTPFFKQLHKGPVNPQFPSQNMIDVDGYSGHSADPTIKSYELNRRWWIGPLENQGPASSVMERLTRALVCIRDVMRDKNVLVQVWVPVNKGGRNVLTTNDDLFSLILAVPGFPNIEKSLLIMNSQLERILQSWLRGCPAGFSQVRFLSGLLMFDSSEVMSTHGLTMLNVMMTCLGVIEVVTTTQKTKYQHELESVCKALEDVDLQSSRNWRTQNVKGCVKPYQAALPEIQEVLRSACETHKLPLAQTWVSCVQQGKDGCRHSDDNYVHCVSTLDHAFHVTDPYIEGFHEACSEHHLLKGQGIVGKAFMTNQPCFSDDITSCVKTEYPLSHHARMFGLHAAVAIRLRSMKTGSTDYVLEFFLPVECRDPEEQKKMLNSLSLIIQQICRSLRVVTDKELEEESDFPISEKIVSSDPRPSGIASFTEVQLSGNDVSIFPMENPREVLGVKSSNLKDAANSIGVCSTTLKRICRQHGIKRWPSRKIKKVGHSLQKLQLVIDSVEGASGAFQINSFYTNFPELTSPNLSRTSPFSTSKLSDQPKPTNLSPEGGVVSPQATASKSPSSSCGQSSSSSQCCSSRTQQHPPTCNVTGDDDPIVGDNSGDGVLKRVRSEAELHAFGQDRTQLLPRSQSHKILNELQKLQPIPPSLKNNGVAQEREVQRVKVAYGDEKTRFRMRSDWRYEDLVQEIAKRFSIEDISNFDIKYLDDDSEWVLLTCDADLEECIDVCRSSQSHTIKLSLHLSRHHLRRFIRIDGPS

SEQ ID NO: 172 - protein, 705 aa, Prunus yedoensis
  var. nudiflora
MRFYLKDAGCRAMLDSTFCSSSRPVCPPISRALTDHPSHYFPPYDHQSNSTVAHLSMSSHQQIYQEENTDGSYPESHSSFVVEGNTEADRRLWIGPRLPEWTPDVRFFRSYEYPRIDYAQQYDVRGSLALPIFENGSGTCLGVVEIVTTPQMVNYCPELEYVCQALEAVDLRSSQNFCPHCVKTCDELYQAALTEIVEVLASVCKTHRLPLAQTWAPCIQQGKGGCRHSDENYAHCVSTVDAACFVADLDILGLHEACSKHHLCRGQGIVGAAFTTNKPCFATDIKAFSKTEYPLSHHARMFGLHAAVAIPFRSVCTGPADFVLEFFLPKDCQDPEEQKQMLNSLCIVIQQACWSLHVDVDKELEEEIMFPIREPVIGSDGGLHKEETQRLISSPTEEPSGKESSWIAHMIEAQQKGKGVSVSLDYQTEEPKEEFKLHQSSGSHGNVEGGADSYSFGGRRTSGGRKAGEKRRTKTEKTISLPVLRQYFAGSLKDAAKSIGVCPTTLKRICRQHGITRWPSRKIKMVGHSLKKLQLVIDSVQGAEGAIHIGSFYSSFPELNSPKFPGSGQYSSMNMSDHSKQVNPLQHDQSGLYSHGTTTKSPSSSCSQTSGPSVCVAGAQQHTVTINNLSSGDALMTEDPVGVLKRACSDADLHASFQEETKLIHRSESHKSFSDNLSYENLPPLPGSSGRSLQDGLQSKSYFQG

SEQ ID NO: 173 - protein, 907 aa, Pyrus x bretschneideri
MDDGVLSPATMLGAQPDSAMDLDFMDELFLEGCWLEARDGPEFPNQSLPNTPLNPSFIWHTLETNGNMSMNPYQNSNQEEMQTPFFKQLEEGPANPQSPCQNMIEDVVAYSGQSEDPTIGRELSTRWWIGPTGNDGSASSVTQRLMTALTYIREVMRNKDVLVQVWVPVNRGGRDVLTTNELFCLDPSCSRLAKYRDISVNYQFSTGEDSTEMVKGLPGRVFSGKVPEWTPDARYFTSDEYPRVRHAQQYDVSGTLALPIFEQGSRTCLGVIEVVTTDRKISYQPDIDGICKALEAVDLRSSRNLSTENVKGCDKPYHAALPEIQEILRSACETHKLPLAQTWVSCIEQGKDGCRHSDDNYIHCVSTVDHACHVADPYIQGFHEACSEHHLLRGQGIVGRAFMTNQPCFSDDMTSFFKTEYPLSHHARMFNLHAAVAIRLRSTDIGSTDFVLEFFLPLECRDPKEQKKMLNSLSLIIQQTCRSLRVVTDKEVEEETKFHVSEVIVPSDPGPSNVACFTEVQQNGNAVSMFPNKKQRKVLSVKLSKLRQHQEDSNLKSAECGEEFSVLGEGEVSFSTVGASKTREKRRAKAEKDINLQVLRKYFSGSLKDAAKSIGVCSTTLKRICRQHGIKRWPSRKIKKVGHSLRKLQLVIDSVEGASGAFQINSFYTNFPELTSPNLSGTSPFSNSKLSDQPNQTNLSPEGGVFSPQATASKSPPSSCSQNSSSSQCCSSKTQQHPFSCNVAGNDDPVGDNSRDGVLKRVRSEAGLHDFGQDRTELLPRSQSQKILCEQQNLQSIPPSLKNNGRVTQVEVQRVKVAYGDEKTRFRMQSNWRYEDLVQQIAKRFSIQDMSNFDIKYLDDDSEWVLLTCDDDLEECVDVCRSSQSHTIKLSLQISRHHLKGLIGRPS

SEQ ID NO: 174 - protein, 907 aa, Pyrus x bretschneideri
MDDGVLSPATMLGAQPDSAMDLDFMDELFLEGCWLEARDGPEFPNQSLPNTPLNPSFIWHTLETNGNMSTNPSQNSNQEEMQTPFFKQLEEGPANPQSPCQNMIEDVVACSGQSEDPTIGRELSTRWWIRPTGNDGSASSVTQRLMTALTYIREVMRNKDVLVQVWVPVNRGGRDVLTTNELFCLDPSCSRLAKYRDISVNYQFSTGEDSTEMVKGLPGRVFSGKVPEWTPDARYFTSDEYPRVGHAQQYDVSGTLALPIFEQGSRTCLGVIEVVTTDQKIRYQPDIDGICKALEAVDLRSSRNLSTENVKGCDKPYHAALPEIQEILRSACETHKLPLAQTWVSCIEQGKDGCRHSDDNYIHCVSTVDHACHVADPYIQGFHEACSEHHLLRGQGIVGRAFMTNQPCFSDDMTSFFKTEYPLSHHARMFNLHAAVAIRLRSTDIGSTDFVLEFFLPLECRDPKEQKKMLNSLSLIIQQTCRSLRVVTDKEVEEETKFHVSEVIVPSDPGPSNVACFTEVQQNGNAVSMFPNKKQRKVLSVKLSKLRQHQEDSNLKSAECGEEFSVLGEGEVSFSTVGASKTREKRRAKAEKDINLQVLRKYFSGSLKDAAKSIGVCSTTLKRICRQHGIKRWPSRKIKKVGHSLRKLQLVIDSVEGASGAFQINSFYTNFPELTSPNLSGTSPFSNSKLSDQPNQTNLSPEGGVFSPQATASKSPPSSCSQNSSSSQCCSSKTQQHPFSCNVAGNDDPVGDNSRDGVLKRVRSEAGLHDFGQDRTELLPRSQSQKILCEQQNLQSIPPSLKNNGRITQVEVQRVKVAYGDEKTRFRMQSNWRYEDLVQQIAKRFSIQDMSNFDIKYLDDDSEWVLLTCDDDLEECVDVCRSSQSHTIKLSLQISRHHLKGLIGRPS

SEQ ID NO: 175 - protein, 1483 aa, Quercus suber
MDPPIKQAKGFIVLHESSSSSSSSSSSSRVLDRKSVIFSAVQHKYIQTYITTSSLKTSYTVYKTLTSVQSPCEMEIERKLNMEYSDFTPNNSTAYGNFSDNNTMASDFMGELLSEGCWLETSTGGFNLLPPAPLPTTTTSRALNDPSHYYLPSLDSNPHQQIYQEDQTEGAFPESESILVDGNELGRRWRIGPRANPGPCSSVKERLVLAVGYLKECTKIMNVLIQIWVPIRKGGRYFLSTYDQPYSFDPNSKSLADYRNVSRAYQFTVEEDREESVGIPCRVFLGRLPEWTPDVRFFKRDEYPRISYAQQYDIRGSLALPVFERGSGTCLGVVEIVTTTQKINYRPELEHVCQALEAVDLRSSQYFSPPTVKACDELYHAALNEIVEVLTSVSKTHRLPLALTWAPCVQQGKGGCRHSDENFAHCVSTVDTACYVADLEVLGFLEACSDYHLFRGQGTVGTAFTTTKPCFATDITAFSKTEYPLSHHARMFGLHAAVAIPLRSIYTGSADFVLEFFLPKDCQDPEEQKQMLNSLSIVLQQARRSLHAVVEKELEEEEILYPVKEVVVASDGKPTSSTTTNLKEAYSKESSWVAHMMEAQQKGKGLSIPLEYQEEEPNEEFKMTTHWDSTQVGLRSGQAFSDSGAQLQQSSESKGSAEGGGDSYSYGGRQSSGGRKAGEKRRTKTEKTISLPVLRQYFAGSLKDAAKSIGVCPTTLKRICRQHGITRWPSRKIKKVGHSLRKLQLVIDSVQGAEGSIQIESFYNSFPELSSQQANSPISSLNMSDSKDPHSKQESGLFSFGSGPLRSPASSCSQTSSPSIYCTTGVEQHSTSINALSSADTLITENLGGILHGACSDAELHALNLQQEPNLIHRVENLKSFGEHPGLETLSCLPGSSSQNSRDGGAFRVKATFGDEKTRFSLHPNWSFGALQLEIARRFNLDDVSRVDIKYLDDDREWVILTCDADLQECMDLFRASQSHTIRLSLQHAYKIHTAPRPSLTNVPALNYLLRSEIYVSEDGQLRSVPLILGYTPKKADVQPAGNAITEGDYRLRRIDVARKNFIAPYDLAPVPHPNPQGEDEGGVQIIPSDSEEELDRQSCVRPPLLLTTVPEDSSEEEMSDLRLLLKRRSNKVEVKGTGTSRPEANLPPPPPAPQVPDPALKPIPDLKKKRPMEPEDKEKGLPPKNKQQKVVKEPRQKRASSVESREEPPLAEVRRGQRIWSPRLELDGVPFPWETSVRNYDGGRAGLIAEALQQPLLLPRDMDSYRRFSQYELFKSLKRDLAMITQQVFVAEEWNRKTHVEAQAEAQARSEAERALDSLKGEISKLSEQLKGVAQERDSLDAGLKNAESQAESQRRQLSETQKNLAAERETTKALHAELLKAKKAAEEAQRDVQLAKEATEAEKRASFQLGVETTEKGLTEQFAAVARDYCDLTWGKALDAAGVPLDSNLNCQKISFMAKIFGSIQMMMSPLHNSQRHLSCP

SEQ ID NO: 176 - skipped

SEQ ID NO: 177 - protein, 863 aa, Quercus suber
MENGFSAPGTILGALPNSAMELALFDELFQDRCWLEAAEGLEFLLQSPSSSGSVLGPSFVWPALEARDNLSLNSSQTGNLDEAQRPLPDESQERSLVNAVSLGQNTVDVVAGCSNESENIVIKGPKLGRRSQIAPNMNQGLTYCLEERLMKAIEYIREFTRGKDVLIQVWLPVNRDGRRVLTTSNQPFAFGSSNPSLASYRDISADFHFAAEEDSKEVLGLPGRVFLGKVPEWTPDVQFFTKNEYFRVVHAQLYDVRGTLALPIFEHGSSNCVGVIEVVMTAQQTQYGPEIESVCKALEAVDLRSFDALSTENLKACPKSYQAALPEIQEVLRFACKTHRLPLAQTWVPCIQQGKVGCRHSNENYIYCVSTVDRACIVADPNMQEFHEACSEHHLLKGEGIVGEAFKTNQPHFSSDITSLSKAEYPLSHHARLFGLHAAVAIHLRSIHTGTDDFVLEFFLPTDCRDPEEQKNMLNSLSCIIQQVCRSLRVVTDKELEEDTNLPVNGTGKLSREEILKEKSFEFCQPYQDSNLKVNVDCGEECSMHGEGNFPSVGKAKTGEKRRTKAEKTIPLEVLQQYFAGSLKDASKSIGVCPTTLKRICRQHGINRWPSRKIKKVGHSLKKLQLVINSVEGASGALQIDSFYTKFPKLASPNLSRTNPFSASKLSDHPQPILQPEGGIFSPQTAASKSPYSSCSQSSSSSHAPTRNVVGCKDPIVGENFSDSALQRITSEAELHASSQAPKLQPKLECLKSFNEHPSAENFPPLQKLKVTYGDEKIRLRMKNNWRYKNLLLEIASRFNIDDISRFDVKYLDDDSEWVLLTCDDDLEECIDICRSSQSNTIKLALQVSRHHVGRSLGSNDTS

SEQ ID NO: 178 - protein, 672 aa, Sesbania rostrata
SPNPNVSVRFFRSHEYPRVVQPHQYGSLALPVFERGTATCLGVLEIVMTNQTIIHYRPQLDNVCNALEAVDFRTSQNYIPPAVKVFDELYQAALNEIVEVLTSVCKTHNLPLALTWAPCIQQGKCGCGVSSDQNYVCCVSTVDSACFVADLDILGFQEACSEYHLFRGQGIVGTAFTTTKPCFAMDITAFSKAEYPLAHHAKMFGLHAAVAIPLRSVYTGSADFVLEFFLPKDCHDSEEQKQMLHSLSMVVQQACRSLHVVMEDDFTLPHSKEEIAPHHHDQKLFASPSQSQVETCSKESSSSWIAHMMEAQQKGKGVSVSLEYLEEPKEEFKVTTNWDTSTDQDQRAQTQVFSDFGQLEQSSGSRFKASVEGGEESYTFGGRRSSSSGRKPGEKRRTKAEKTISLPVLRQYFAGSLKDAAKSIGVCPTTLKRICRQHGITRWPSRKIKKVGHSLKKLQLVIDSVQGAEGAIQIGSFYASFPELSSADFSASRRSESSKKMMNGYPENSLYGHGDGITSLKSPPSACSQNFGPTTNQSSTIITNNGDVLMTESPAPPPPPPHTDAALLRRVHSEAELLHGSIQFEDTKHFTTRAKSQQTVLPPLSESSGWNSLERGAFRVKATFADEKIRFSLQPMWGFRDLQLEIARRFNLNDVSNMVLKYLDDDGEWVVL

SEQ ID NO: 179 - protein, 841 aa, Solanum lycopersicum
MEDAAFTLLAKLHDDNNATDFTEFGFWLEATDQPSNSNSNYCTSNQMDSAPPTQSRRKLWIGPNNPNPTSSIPPVNTRLVQAIEYLKNSTTHNKEVLIQIWVPVNRGGKHVLITNNQPYFLNPNSHSLLQYRNVSQNYQFAADKDSNELVGLPGRVFLKKLPEWTPDVRFFKSEEYPRVNYAHQHNVRGSIAVPVFETGSGTCLGVVEIVTTIQKTHYHLELEHVCKALEAVNLRSSGISSNPSKIKDQDCNESYLAALAEIQYILTCVCDTHKLPLAQTWAPCIQQGKGGCLQSDENFASCVSTVDSSCYVRDQHVVPFHLACSEHHLLKGEGVAGGAFNTNQPCFATDITAFSKAEYPLSHHARMFGLCSAVAIRLRSIYTGSADFVLEFFLPLDCKNTEEQKIMLSSLSSVIQQSCRSLRVVTDQELQEEKEVVRLPIGEEESRKPVSSSYRDQDASSWLSEMLDAQRKGKGAAAVSENFKVTATPWDYTQRESIHASTFSEPNQTFEPKGGSFDFSSGTGSHSSGAKRAGERRRSKTEKSISLQVLRQYFAGSLKDAAKSIGVCPTTLKRICRQHGITRWPSRKIKKVGHSLQKLQLVIDSVHGAEGAIKLSSFYTNFPELNSPNNPGTSNFSASKNDDHLQQVNTQPDGSPVTTTSKSTSSSGSHNSSSSLFCSTGSKNCTTEENPGGMPKRAHTETGLHDMGQEETKLLVRSQSQKIQSNHNSVEPVCPLSTSSNQVLGRFKVKAIFGKEKIRFSLQSHWGFRDVKHEVMRRFNVEDVGKIDLKYLDDDDEWVLLTCDADLEECIDIHKFSKRRTIKVSLHHTNLGSSFGSSGPA

SEQ ID NO: 180 - protein, 912 aa, Solanum lycopersicum
MDERVIPSNPLLTTPSDYLMDLDYMDGLFLEGCWLETTDGNEFLQHSPGIFNAPFDSSFMWPTTIDANNVEFNGISSKDAQQEKQRPSLTENLSINHCQELNYAKVQSFGENMNNAMCTSSLSENHLVEAHELNKRWWIGPKASSSVMDRLIWALGYIRDCSRDKDILLQLWVPINRDGRRVLSTTNQPFLLDLNCPQLANYREVSVNYQFPANEDSKEIVGLPGRVFADKVPEWTPDVRFFRSEEYPRVEHAQQYDVRGTLAVPVFEQGSRNCLGVIEVVMTTQKIKYRSELESVCKALEAVDLSTSEVSTTQDAKVCDLSYQAALPEVLEVLKSACETHGLPLAQTWVPCIQQGKGGCRHSQENLIHCVSTEDSACYVADPRVQGFHDACSEHHLLKGQGVVGRAFNTNQPCFSADLTSYSKSEYPLSHYAKMFGLQAAVAIRLRSISTGSSDFVLEFFLPSDCRNPEDHRKMLTSLSIIIQNVCRTLRVVTDKELQEETISVGEMANHTVEQHKEHTETSQERTSWTSCDAEFQESSVMSTFQDEKPDEMLRKDSVEFRHRKNSAYEEGVSRNLGKTGDRRRAKAEKTITLQVLQQYFAGSLKDAAKSIGVCPTTLKRICRQHGIKRWPSRKIKKVGHSLQKIQRVIDSVQGASGTLQIESFYSNFPELASPNASRMSPFADSKSNEHPTALNTQQERCITSPNPDASKSPSSSSSRSSSSSQCCSSGTKPQSPQSHPLSIVGDEDLIVQEESVDNAVKRVKSEPELHLSSEALKTIPRSQSHLCVAENPISENLVLKRSPSTSQEEAPRVKVTHGEEKIRFRMQNSWRYNDLLREITRRFGIDDPSGLQLKYLDDDSEWVLLTCDADLEECIDVCMSSQIQMIKLILVQDSQHHFGSSFGSSSPILVQ

SEQ ID NO: 181 - protein, 913 aa, Solanum tuberosum
MDERVIPSNPLLTTPSDYLMDLDYMDGLFLEGCWLESTDGNEFLQHSPGIFNAPFDSSFMWPTTIDANNVEFNGISSKDAQQEKQRPSLTENLSINHCQEINYAKVQSFGENMNNAMCTSSLSENHLVEAPELNKRWWIGPKASSSVMDRLIWALGYIRDCSRDKDILLQLWVPINRDGRRVLSTTNQPFLLDLNCPQLANYREVSVKYQFPANEDSKDIVGLPGRVFADKVPEWTPDVRFFRSEEYPRVEHAQQYDVRGTLAVPVFEQGSRNCLGVIEVVMTTQKIKYRSELESVCKALEAVDLSTSEVSTTQDAKVCDLSYQAALPEVLEVLKSACETHGLPLAQTWVPCIQQGKGGCRHSEENLIHCVSTEDSACYVADPRVQGFHDACSEHHLLKGKGVVGRAFNTNQPCFSADLTSYSKSEYPLSHYAKMFGLQAAVAIRLRSISTGSSDFVLEFFLPSDCRNPEDHRKMLTSLSIIIQNVCRTLRVVTDKELQEETVSMGEVANHTVEPHKEHTETSQERTSWTSCDAEFQESSVMSTFQDEKPDEMLRKDSVEFRHRKNSAYEEGVSRNLGKTGDRRRAKAEKTITLQVLQQYFAGSLKDAAKSIGVCPTTLKRICRQHGIKRWPSRKIKKVGHSLQKIQRVIDSVQGASGTLQIESFYSNFPELASPNATRMSPFADSKSNEHPTALNTQQEGCITSPNPDASKSPSSSSSRSSSSSQCCSSGTKPKSPQSQPSNIVGDEDLIVQEKSVDNAVKRIKSEPELHLSSEALKTIPRSQSHACVAENPKSENPLVKRSPSTSQEEAPRVKVTHGEEKIRFRMQNSWRYNDLLREITRRFGIDDPSGLQLKYLDDDSEWVLLTCDADLEECIDVCMSSSQIQMIKLILVQDSQHHYGSSFGSSSPILVQ

SEQ ID NO: 182 - protein, 882 aa, Solanum tuberosum
MEDAAFTLHDNNNTTSDFTEFLSDGFWLETTTTTTTATDQAGSNYFSPHPLLLDTTTNQMDPPTTQLPPPRRLWIGPNTLTNPNPTIPVNTRLVQAIEYLKNYTTHKDVLIQIWVPVNRGGKHVLITNNQPYFLNPNSHSLLEYRNVSQTYQFAAEKDSKELVGLPGRVFLKKQPEWTPDVRFFKREEYPRVRYAHQHNVSGSIAIPVFESGSGTCLGVVEIVTTIQKTPELEDVCKALEAVNLRSSRISSNPSKIKDCNESYLSVLAEIQYILTCVCDTHKLPLAQTWAPCIQQGKGGCLQSDENFASCVSTVDSACYVRDQHVVPFHLACSEHHLLKGEGVAGGAFNTNQPCFAMDITAFSKAEYPLSHHARIVGLCSAVAIRLRSILTGSADFVLEFFLPLDCKNTEDQKIMLSSLSSVIQQSCRSLRVVTDQELQEEKELVQREKVSLSIGGYHEEESRKPVSSSYRDQDASSWLAEMLDAQRKGKGAAAVSENHNDEQEENFKVTATPWDYTLRESIHASTFSEPNQNFEPKGGSGGSFDFSSGTGSHSSGAKRAGERRRSKTEKSISLQVLRQYFAGSLKDAAKSIGVCPTTLKRICRQHGITRWPSRKIKKVGHSLQKLQLVIDSVHGAEGAIKLSSFYTNFPELSSPNNPGTSNFSASKNNDHLQQVNTQPDGSPVTTTSKSTSSSGSHNSSSSLFCSTGSKNLFPCTNVFSTTEENPGGMLKRAHTETELHDMGQEETKLLVRFTSQKIQSNHNSVEPLCPLPTSSNQVLRDSGTFKVKAIFGKEKIRFSLQSHWGFGDVKHEVMRRFNVEDVGKIDLKYLDDDDEWVLLTCDADLEECIDIHKFSKRRTIKVSLHHTYRTNLGSSFGSSGPA

SEQ ID NO: 183 - protein, 727 aa, Sorghum bicolor
MEKAPQTDDDGLLACGVMEMDDIAVGDLDLMEELFMAAPGFDFSDFSQPGPGGASPGSCFSPLFDICSTTTTATPPPAPEPAGDDDQAAAAPPPRRGWVFQPRHEVEATVKERLRRALERIASLSQTQPGELLAQVWVPTVIGDRQVLTTCGQPFWLDRRNERLANYRTVSMKYQFSADETARADLGMPGRVFVGRVPEWTPDVRYFSTEEYPRVRHAQYFDIRGSVALPIFEPRSRACLGVVELVMTTEKVNYNAEIQNICSALKEVDLRSSDVSSDPRAKVTDTSYRATIPEIVDVLRTVCETHKLPLAQTWIPCICQAKRGSRHTDEKLKYCVSTVDEACYVRDLNVKGFHEACSEHHLFRGEGVVGRAFGTNEPCFSEDITTSSKVQYPLSHHAKLFSLRAAVAIRLRSITTGSLDYVLEFFLPVDCIEIEQQRAMLNSLSITIQQTCYTLRVVSLKELVDEGSIETSALTPPEYAKTMHENLDEVCSGIDAPARTASLETSEEVSSWIASLVCAQNKGVKEMDGDLPFGFSKQEDEGFSVTAGWHTTPVIGPEGSIFSGIKQHEDYKVKEVTCLRDPSSSKLGKTVEKRRTKMEKTVSLEELRKHFAGSLKEAAKNLGVCPTTLKRICRQHGINRWPSRKIKKVGHSLKKLQMVIDSVHGNEGTVQLSSLYENFTKTTWSERELQGDASYPLSEEKAKAQIPAMVVPVVRNHNNMAVLLNLQ

SEQ ID NO: 184 - protein, 645 aa, Sorghum bicolor
MGLPVFEKGSYNCLGVIELIMTRQKLNFTSELNTICSALQAVNLRSTEVSSIPRIKFSTASYKDALPEILEVLRAACLTHKLPLAQTWVTCAQQGKRGSRHSDENYRYCISTIDEACFVNEAEMRGFHEACSEHHLLRGEGVAGKAFTTNQPCFLPDIGSSTKLEYPLSHHAKIFKLKGAVAIRLRCTRTGTADFVLEFFLPTDCEALEEQKTVLDSLSSTMRGVCQTLRVVTDREMEDEAVLEMNELNSFTPQGKDKVEELSFGGKSADRRGEASWTSLAGTSQQESELAALRMHGMFSPGGQGPSLSGVQATAEGSKAKRRTKAEKTVSLQVLRQYFAGSLKDAARSLGVCPTTLKRICRQHGITRWPSRKIKKVDHSLRKLQQIIDSVHGAETAFQLNTLYKDLTNTSISSDNNLSGSVMVPPTNQSNLTDFNKHQPHKSSSNVPSTSHSHSSCSHSSKSSPSCSGGATKHAQQGIIDLIKSKNPVKDSSIQTLQTENPSLYEHFSVHEAPIDLLQDVTEKANGGHHSSPSPSSHNPKQNTDANMRVKATFGSEKVRFRLNPECNFQELKHEIAKRLSIVDTNPLVLKYLDDDSEWVLMTCDADLQECLHVYKLADIQTIKISVHLAISPATRVTTGHTGLS

SEQ ID NO: 185 - protein, 674 aa, Trema levigata
MPITLQAVDLRSSQNFSPPAVKVCDELYQAALSEIVEVLVSVCKIHRLPLALTWAPCHQQGKGGCRHSDENYARCVSTVDSACLVSDLEILGFHEACSEHHLFRGQGIVGTAFTTNKPCFATDITAFSKTEYPLSHHARMFGLRAAVAIPLRSVYTGSSDFVLEFFLPKDCQDPEEQKQMLNSLSIVIKQACRSLHVVVEKELEEEQVMLPIGDPTIVASSEGGLKLGTTTTTTATNTTTCPVGDQSSGKESSSVAHMMEAQQQGRGVSVSLDYLTEEPKEEFRGTTHWDNLNHGDLSNGQVFSDFGQLQHCSGSKGSIEGGIDSYSFGGRRSSGARKAGEKRRTKTEKTISLPVLRQHFAGSLKDAAKSIGVCPTTLKRICRQHGITRWPSRKIKKVGHSLRKLQLVIDSVQGAEGAIQIGSFYSSFPQLNSPKFQGNSNDSFSSISPSDHHHHHHHLNNQSNSQPESGFFIHGSAMKSSPSMSSQASGLQQSTTTSSGFNVDPLITEDPSVILKRAWSSDGELFASNQDEANLLSRSQSYKALSDQNRILDQTLPPLPDNNERINSRDGFAFRVKANFGEKKIRFSLPPNCSFRDLQLEIMRRFALDDITMIDSKYLDDDREWVLLTCNADLQECLEIHRQSQNRTIRICLQQAPSDQLIEESPFGSSSSPC

SEQ ID NO: 186 - protein, 924 aa, Trema levigata
MEDGVLSPATILGAPADYPMDLDFVDELFLEGCWLETRDGSEFLNQNSPSSNPLFDPLFWPTLEPNGESNAPKSIQEERHGSLFIESQGKSPLHTLPPPRATTDVVKYSGVSEAYITEGSSELSGRWWIEPKANPGPSSSVMERLWRALMYIKDVIRDKDILVQIWVPVHKEGRRVLTTRDLPFALDDNSSKLARYRDISVKYQFSAEEDSKELVLGLPGRVFSGKVPEWTPDVRFFRNDEYPRLIHAQQNDVRGTLALPIFELDSRTCLGVVEIVMTTQKIKYRRELESVCKALEAVDLKSSEVLSTQNVFNKYYQVAIPEIQQVLRSACDTHRLPLAQTWVPCIYQGKEGCRHSDENYGQCVSTVDHACYALDPQVQSFHEACSEHHLFRGQGVVGLAFMTNQPCFSADITSYTKTEYPLSHHARMFRLQAAVAIRLRSIHTGAADFVLEFFLPVDCKDPEEQKKMLTSLSLIIQQCCQSLRVITDKELEEESGSRVDEVVVPSNPRPAWDTCFTEAPQNDTDLSLFPEEKKPREISDGRLSKLSDNQRDSSLKPSVECVEECSTVGEGSFSSVGVGKTGERRRTKAEKTITLQVLRQYFAGSLKDAAKSIGVCSTTLKRICRQHGIKRWPSRKIKKVGHSLQKLQLVIDSVQGASGAFQIDSFYTNFPELASPNVSGTSPFSTSKPNDHPMPSNMQPGDGGTFSVQAATAAATSKSSSSCSQSSSSSHCCSSKSQLHPQTWNNVTSSDDLIAGENSGGGDDVVLKRVRSEAGLNACSEDDRKLLPRSQSHKSLMEHHRTEKWFPTSSAKNNNNGARIPQQQGEFQRVKVTYGEDNSRFRMQNNWGFIDLQQEVGRRFGIQDMVKFTLKYLDDDSEWVLLTCDADLEECFEVYRSSQNAPIKLSLQPSRHLYRGCLRGNDPL

SEQ ID NO: 187 - protein, 640 aa, Trema orientalis
MPITLQAVDLRSSQNFSPPAVKVCDELYQAALSEIVEVLVSVCKIHRLPLALTWAPCHQQGKGGCRHSDENYARCVSTVDSACLVSDLEILGFHEACSEHHLFRGQGIVGIAFTTNKPCFANNITAFSKTEYPLSHHARMFGLRAAVAIPLRIVYTGSSDFVLEFFLPKDCQDPEEQKQMLNSLSIVIQQACRSLHVVVEKELEEEQFMLPVGDPTIVASSEGGLKRGTTTTTATTNTTTCPVGDQSSGKESSWVSHMMEAQQQGRGVSVSLDYLTEEPKEEFRVTTHWDNLNHGDLSNGQVFSDFGQLQQCSGSKGSMEGGIDSYSFGGRRSSGARKAGEKRRTKTEKTISLPVLRQYFAGSLKDAAKSIGVCPTTLKRICRQHGITRWPSRKIKKVGHSLRKLQLVIDSVQGAEGAIQIGSFCSSFPQLNSQGNSNDSFSSISPSDHHHHHHHHHLNNQSNSQPESGFFIHGSAMKSSPSMSSQASGLQQSTTFSGFNGDPLITEDHSVILNRACSSDGELFASNQDEANLLSRSQSYKALSDQNRILDQTLPPLPDNNERINSRDGFAFRVKANFGEKKIRFSLPPNCSFRDLQLEIMRRFALDDITMIDIKYLDDDREWVLLTCNADLQECLEIHR

SEQ ID NO: 188 - protein, 927 aa, Trema orientalis
MEDGVLSPATILGAPADYPMDLDFMDELFLEGCWLETRDGSEFLNQNPPSSSPLFDPLFWPTLEPNGESNANPSPKSNQEERHRSLFIESQGKSPLHTLPPPWATTDVVKYSGVSEAHITEGSSELSRRWWIGPKANPGPSSSVMERLWRALMYIKDVIRDKDILVQIWVPVHEEGRRVLTTRDLPFALDDNSSKLARYRDISVKYQFSAEEDSKELVLGLPGRVFSGKVPEWTPDVRFFRNDEYPRLIHAQQNDVRGTLALPIFELDSRTCLGVVEIVMTTQKIKYRPELESVCKALEAVDLKSSEVLSTQNVFNKYYQAAIPEIQQVLRSACDTHRLPLAQTWVPCIYQGKEGCRHSDENYGQCVSTVDHACYALDPQVQSFHEACSEHHLFRGQGVVGLAFMTNQPCFSADITSYTKTEYPLSHHARMFRLQAAVAIRLRSIHTGAADFVLEFFLPVDCKDPEEQKKMLTSLSLIIQQCCQSLRVITDKELEEESGSRVDEVVVPSNPRPARNTCFTEAPQNDTDLSLFPEEKKPREISDGRLSKLSDNQRDSILKPSVDCVEECSTVGEGSFSSVGVGKTGERRRTKAEKTITLQVLRQYFAGSLKDAAKSIGVCSTTLKRICRQHGIKRWPSRKIKKVGHSLQKLQLVIDSVQGASGAFQIDSFYTNFPELASPNVSGTSPFSTSKPNDHPMPSNMQPGDGGIFSVQAATAAATSKSSSSCSQSSSSSHCCSSRSQLHPQTWNNVTSSDDLIAGESSGGGDDVVLKRVRSEAGLNACSEDGRKLLPRSQSHKSLMEHHKTEKWFPPSSAKNNNNGARIPQQQGEFQKVKVTYGEDRTRFRMQNNWGFIDLQQEVGRRFGIQDMVKFTLKYLDDDSEWVLLTCDADLEECFEVYRSSQNATIKLSLQPSRHLYRGCLRGNDPL

SEQ ID NO: 189 - protein, 569 aa, Trema orientalis
MEYGCQSPPNSLMEARFGSPQNSGISVTFVDLDKSDVDVDDDFFQYINASSFSFKPVTNPGSSFCLGAAASKMTSSGLSQQSFPTMEEFNQYESTPRTLEPIGVQNQNKNKLQLQADKEGDRDCSAGGGGSITSEDGFYWRKYGQKQVVGSKYPRIYYKCMHLNCKVKKKVKRSDEGHITEILHSGVHNHHHKPPNPRSAIGSSDSYSPATEKRCPPKNTLDLPQTNFEASSIENSQLDLTRSQNAEVQVSLNRSISSDLLNSVVPIQPSYSNIFCDNQAAWPKIKELLKLACQRYRLPLAQTWVPCGHRLFDQDSNSNNNLCAYSISDQAFYAGTILMQVFHDVCSKHYLLKGQGIVGEAFVTNKPRFSADVTSCCRAEYPLSYHTKRLKFRSAVAIPAYWDGSIPPGDRTAPDFVVEFFLPLDCTDVEEQKNMVTSLESFIALDLCIAAELEPEQESGSKQGGDNGLIPRSVTNLTEGKFSSVAESDTSEEPRHTRCSMKTTDLLAGGLKDAEKKSTTRDSEIAIDSIALAWILDLDMALYFVWLSALWLLISYGCYLPRISLFCGN

SEQ ID NO: 190 - protein, 675 aa, Trema tomentosa
MPITLQAVDLRSSQNFSPPAVKVCDELYQAALSEIVDVLVSVCKIHRLPLALTWAPCHQQGKGGCRHSDENYARCVSTVDSACLVSDLEILGFHEACSEHHLFRGQGIVGTAFTTNKPCFATDITAFSKTEYPLSHHARMFGLRAAVAIPLRSVYTGSSDFVLEFFLPKDCQDPEEQKQMLNSLSIVIQQACRSLYVVVGKELEEEQFMLPVGDPTIVASSEGGLKRGTTTTTTTTNTTTCPVGDQSSGKESSWVSHMMEAQQQGRGVSVSLDYLTEEPKEEFRVTTHWDNLNHGDLSNGQVFSDFGQLQQCSGSKGSIEGGIDSYSFGGRRSSGARKAGEKRRTKTEKTISLPVLRQYFAGSLKDAAKSIGSCPTTLKRICRQHGITRWPSRKIKKVGHSLRKLQLVIDSVQGAEGAIQIGSFYSSFPQLNSPKFQGNNNDSFPSISPSDHHHHHHHHHLYNQSNSQPESGFFIHGSAMKSSPSMSSQASGLQQSTTFSGFNGDPLITEDHSVILKRACSSDGELFASNQDEANLLSRSQSYKALSDQNRILDQTLPPLPDNNERINSRDGFAFRVKANFGEKKIRFSLPPNCSFRDLQLEIMRRFALDDITMIDIKYLDDDREWVLLTCNADLQECLEIHRQSQNCTMRICLQQAPSDQLIEESPFGSSGSPC

SEQ ID NO: 191 - protein, 927 aa, Trema tomentosa
MEDGVLSPATILGAPADYPMDLDFMDELFLEGCWLETRDGSEFLNQNPPSSSPLFDPLFWPTLEPNGESNANPSPKSNQEERHRSLFIESQGKSPLHTLPPPWATTDVVKYSGVSEAHITEGSSELSRRWWIGPKANPGPSSSVMERLWRALMYIKDVIRDKDILVQIWVPVHEEGRRVLTTRDLPFALDDNSSKLARYRDISVKYQFSAEEDSKELVLGLPGRVFSGKVPEWTPDVRFFRNDEYPRLIHAQQNDVRGTLALPIFEQDSRTCLGVVEIVMTTQKIKYRPELESVCKALEAVDLKSSEVLRTQNVFNKYYLAAIPEIQLVLRSACDTHRLPLAQTWVPCIYQGKEGCRHSNENYGQCVSTVDHACYALDPQVQSFHEACSEHHLFRGQGVVGLAFMTNQPCFSADITSYTKTEYPLSHHARMFRLQAAVAIRLRSIHTGAADFVLEFFLPVDCKDPEEQKKMLTSLSLIIQQCCQSLRVITDKELEEESGSRVDEVVVPSNPRPARNNCFTEAPQNDADLSLFPEEKKPREISEGRLSKLTDNQRDSRLKPSVECVKECSTVGEGSFSSVGVGKTGERRRTKAEKTITLQVLRQYFAGSLKDAAKSIGVCSTTLKRICRQHGIKRWPSRKIKKVGHSLQKLQLVIDSVQGASGAFQIDSFYTNFPELASPNVSGTSPFSTSKPNDHPMPSNMQPGDGGIFSVQAATAAATSKSSSSCSQSSSSSHCCSSRSQLHPQTWNNVTSSDDLIAGESSGGGDDVVLKRVRSEAGLNACSEDDRKLLPRSQSHKSLMEHHKTEKWFPPSSAKNNNNGARIPQQQGEFQKVKVTYGEDKTRFRMQNNWGFVDLQQEVGRRFGIQDMVKFTLKYLDDDSEWVLLTCDADLEECLEVYRSSQNATIKLSLQPSRHLHRGCLRGNDPL

SEQ ID NO: 192 - protein, 581 aa, Trifolium pratense
VVDLRSSGHSSLQNVKACDKSYETALPEIQEVLRSACEMHKLPLAQTWISCIQQGKDGCRHSDDNYANCISPVEYACYVGDSSVRFFHEACMEHHLLKGQGVAGGAFMTNQPCFSADITSLSKTDYPLSHHARLFGLRAAVAIRLRSIYSTSDDYVLEFFLPVDCNDSEEQKNMLTSLSMIIQRVCRSLRVITDKELDKDNLPSNEVMAVTDGRFATNAIWSESQHRRMAASLGGEEKLSETMSRKFSEQRRQQETLTLKGDLDCGRASSPSVEGTFLSSLGINRTGEKRRAKAEKTITLQVLRQYFAGSLKDAAKNIGVCTTTLKRICRQHGIKRWPSRKIKKVGHSLQKLQLVIDSVQGASGSFQIDSFYSKFSDLSSPRTSLISTLNQIDNQVSLSTLPDPDSLSPEGASKSPSSSCSQSSFSSHSCSSMSEQQHRKGNVAIGNKDPSVGEDSVDVVLKRIRSEAELKSLIQDNKTKLMPRSQSQETLGENPKTEHHKSFLKSAPKASQKEDSHRVKVTFGDEKTRFRLPKNWGYEDLVQEIARRFNIWRSALMFVNLLRLVPSNFVCNPPVILSGVL

SEQ ID NO: 193 - protein, 587 aa, Trifolium pratense
MLMETNVVDLRSSGHSSLQNVKACDKSYETALPEIQEVLRSACEMHKLPLAQTWISCIQQGKDGCRHSDDNYANCISPVEYACYVGDSSVRFFHEACMEHHLLKGQGVAGGAFMTNQPCFSADITSLSKTDYPLSHHARLFGLRAAVAIRLRSIYSTSDDYVLEFFLPVDCNDSEEQKNMLTSLSMIIQRVCRSLRVITDKELDKDNLPSNEVMAVTDGRFATNAIWSESQHRRMAASLGGEEKLSETMSRKFSEQRRQQETLTLKGDLDCGRASSPSVEGTFLSSLGINRTGEKRRAKAEKTITLQVLRQYFAGSLKDAAKNIGVCTTTLKRICRQHGIKRWPSRKIKKVGHSLQKLQLVIDSVQGASGSFQIDSFYSKFSDLSSPRTSLISTLNQIDNQVSLSTLPDPDSLSPEGASKSPSSSCSQSSFSSHSCSSMSEQQHRKGNVAIGNKDPSVGEDSVDVVLKRIRSEAELKSLIQDNKTKLMPRSQSQETLGENPKTEHHKSFLKSAPKASQKEDSHRVKVTFGDEKTRFRLPKNWGYEDLVQEIARRFNIWRSALMFVNLLRLVPSNFVCNPPVILSGVL

SEQ ID NO: 194 - protein, 950 aa, Trifolium pratense
MEYGGGLVGDGGVFGNMVGGGGEAADMIEELLVDGCWIEASENNMMAMQSQTQTHYMSTNNNNNNNIPIGMGEGDHFNNHHHNQIECNVPTDHDDDQESGFVVGKRWWIGPRANPGPSTSVKERLVVAVGYLKEYTKNSSNNVLIQIWVPALRRRSPLLIHNHYLHESSSSAPVSVNPNTNVHVRFFRSHEYPRHQQQQYGSLFALPVFERGSGTCLGVIEFVITNQTVVNYRPQLDHLSNALEAVDFRSSHNMNIPSAVKVFEELYEAAVNEIVEVLASVCKTHNLPLALTWAPCIQQQGGGVRGKGTAGAAGCGVSVAVPTDQMNNNQMMMNCVSTVDSACYVGDMEVLGFQEVCSEYHLFNGQGIVGTAFTTTKPCFAIDITAFSKAEYPLAHHANMFGLHAAVAIPLRSVYTGSAADFVLEFFLPKDCRDPEQQKHMLNSLSLVVQQACRSLHLHVVMDDTDNANHHDHDQDQFTFPTTTTTNNYMPSSASDAATASLSQVDATSGCSTKDTSSSCSWIAHMMEAQHKGKGVSVSLEYLQEPKEEFKVTTCNWDREREGNSVFSEFGQVLQHDQSSNSRASVEAGEESGGCGVGGGRRSSSSSSGRKSGDKRRTKAEKTISLPVLRQYFAGSLKDAAKSIGVCPTTLKRICRQHGITRWPSRKIKKVGHSLKKLQLVIDSVQGAEGAIQIGSFYASFPELSTATANGGGGGGGGDHNNVNNSFYNSHGDGVVNGLKSPPSACSQTHAAGNKLITANIINGDHHHHHHHVMMTENPAAPLAADALMMHGSNINIQNYQQLQEDQDTKQLLLHFNNNNQTLPPRPTAGAWNNNNNSSSSGLLERGAFRVKATFADEKIRFSLQAMWGFRDLQLEIARRFNLNDMNNLVLKYLDDEGEWVVLSCDADLEECKDLHTSSHTRTIRLSLFQASPLNLPNNFVRNSSSSPSS

SEQ ID NO: 195 - skipped

SEQ ID NO: 196 - protein, 898 aa, Trifolium subterraneum
MGDGAAVTSSATMMEGPSQDENSMDFDYMSELLLDGCWLEASADGSEFLLQSSPFSNPIFDPSFSWPSLENTEPTRNEDGHVGVEQESQIIVNNAGSSDRQQCEFETRSGEGVSRLWIPPTPNPGLGGSSITEKLIRALKWIKDFNRNKDMLIQIWVPVNRGDDRPILRANDLPFSLESRSLNLAKYREISVRYQFSAEEKDSKELVAGLPGRVYRDKIPEWTPDVRFFRSEEYPRVDHAQECDIHGTLAVPVFEQGSRTCLGVIEVVMTTQQSNYGRELETVCKALEVVDLRSSGHSSLQNVKACDKSYETALPEIQEVLRSACEMHKLPLAQTWISCIQQGKDGCRHSDDNYANCISPVDYACYVGDSSVRFFHEACMEHHLLKGQGVAGGAFVTNQPCFSADITSLSKTDYPLSHHARLFGLRAAVAIRLRSIYSTSDDYVLEFFLPVDCNDIEEQKNMLTSLSMIIQRVCRSLRVITDKELDKDHLSSNEVMAVTDGQFATNAVWSESQHRGMAASLGGEEKFSETMGRKFSEQRRQQETLTLKGDLDCGRVRSPSVEGTFLSSLGINRTGEKRRAKAEKTITLQVLRQYFAGSLKDAAKNIGVCTTTLKRICRQHGIKRWPSRKIKKVGHSLQKLQLVIDSVQGASGSFQIDSFYSKFSDLSSPRTSLISTLNQIDNQVSLSTLPDPDSLSPEGASKSPSSSCSQSSFSSHSCSSMSEQQHHKGDVAAGNKDPSVGEDSVDVVLKRIRSEAELKSLIQDNKTKLMPRSQSQETLGENPKTEHHKSLLKTARKASQKEDSHRVKVTFGDEKTRFRLPKKWGYEDLVQEIARRFNVSEMSKFDIKYLDDDYEWVLLTCDADLEECIDVSQSSETSTIKLCLQPSSNFIRSSLEFR

SEQ ID NO: 197 - protein, 934 aa, Trifolium subterraneum
MEYGGGLVGDGGVFGNMVGGGGEADMIEELLVDGCWIEASENNMMAMQSQTHYMTNNNIPINGMGEGDHFNNHHHNQIECNVPTDHDDDQESGFVVGKRWWIGPRANPGPSTSVKERLVVAVGYLKEYTKNSSNNVLIQIWVPALRRRSPLIHNHYLHESSSSAPVSVNPNTNVHVRFFRSHEYPRHQQQQYGSLFALPVFERGSGTCLGVIEFVITNQTVVNYRPQLDHLSNALEAVDFRSSHNINIPSAVKVFEELYEAAVNEIVEVLASVCKTHNLPLALTWAPCIQQQGGGVRGKGTAGAAGCGVSVTAPTDQMNNNNQMMMNCVSTVDSACYVGDMEVLGFQEVCSEYHLFNGQGIVGTAFTTTKPCFAIDITAFSKAEYPLAHHANMFGLHAAVAIPLRSVYTGSAADFVLEFFLPKDCRDPEQQKHMLNSLSLVVQQACRSLHLHVVMDDTDNANHHDHEQDQFTFPTTTNNYMPSSASDAATASLSQVDATSGCSTKDTSSSCSWIAHMMEAQHKGKGVSVSLEYLQEPKEEFKVTTCNWDREREGNSVFSEFGQVLQHDQSSNSRASVEAGEESGGCGVGGGRRSSSSSSGRKSGDKRRTKAEKTISLPVLRQYFAGSLKDAAKSIGVCPTTLKRICRQHGITRWPSRKIKKVGHSLKKLQLVIDSVQGAEGAIQIGSFYASFPELSTATANGGGGDHSNVNNSFYNSHGDGVVTGLKSPPSSCSQTHAAGNKLITANTINGEHHHHVMMTENPTGPSAADALMMHGSNINIQNYQQLQEDQDTKQLLLHFNNNNNQTLPPRPTGGAWNNNNSSSSGLLERGAFRVKATFADEKIRFSLQAMWGFRDLQLEIARRFNLNDMNNLVLKYLDDEGEWVVLSCDADLEECKDLHTSSHTRTIRLSLFQASPLNLPNNFVRNSSSSPSS

SEQ ID NO: 198 - protein, 784 aa, Triticum urartu
MSSEGDLDLLEQLLSGDNAWLEVAPNTSRSPNFFASPSTFLSDATATTTTTPAGANSTLWIPPASSTVRQRFEQALDYIKQMQRDAGMLVQLWVPQKNCDGKLVLTTSGQPFTLDNTSDRLMQFRDVSTHYHFSADVGSEASPVGLPGRVFIGKLPEWSPDVRLFTSYEYPRVKYAQDLDVHGTMGLPVFEKGSYSCLGVMELIMTRQKLNFTSEINDICRALQAVNLRSTEVSSTPRATKFNSASYKDALPEILEVLRAACVTHNLPLAQTWVTCAQQGKGGSRHTDENYPYCISTIDTACYVNDPQMQNFHDSCSDHHLLRGQGVAGKAFETNQPCFLPDIGSSAKEHYPLSHHAKIFNLKGAVAIRLRCTRTGTADFVLEFFLPTNCEALEEQKAVLDSLSGTMRSACRTLRVVTDKEIGDEEMLEVNELNSFGPQGKNKVEELSFGNQATEHREEASWTSLARTSKESDLAELSMHGMLSPVGQGLSPAGAQTSAQGSKGKRRTKTEKTVSLPVLRQYFAGSLKDAARSLGVCPTTLKRICRQHGINRWPSRKIKKVDHSLRKLQQIIDSVHGGETAFQLNTLYKDLTNTSVSSDNNLSGSVTVPPHKQSNLTDFEGHRHHRLSSNVPSTSHSHSSCSQSSDSSPSSCSGGSTKHPPQAGVDLLMSGNPVNHSPVQTLQTENASTRGHFPVQEAPDLLHNLNQQALGGQHSSRSPSPPKQNADAGWISLNKVKPKWCCLYFREKADHVYNAKRTVGIHVYLHGSKNISIGMKGRTYQDHC

SEQ ID NO: 199 - protein, 703 aa, Vigna angularis
MEYGGFSDIFAPETEFMDELFVEGCWVETRVGCGTEASKWNRSMESNGAHIIFEEESEAESLMVGKRWWIGPRGNPGPSSSVKERLVVAVGYLKEYAKNSNMVIQVWVPARRGCEVGIHHHQDFPYTLDYTNNGDATGSFQFHEDWLSDHWPPNIRFLRTHDYTRLHHYDLRPGSLALPVFQRGTGICLGVVDILMPNNVNPDLHNLQGVDFRTPSLQNFIPPAMTVKVPFTTSKPCFANDITAFTKAEYPLAHHANMFGLHAAVAIPLRSVSSDFVLEFFLPKDCHDTQDQKQILNSLSMLVQQACRSLHVVLDKEEEEEELVSHHHHHHSKEMESSSWIAHMMEAQQKGKGVSVSLEYLQEPKQEFKVTTNGNEQVFSDLEGTSGAGVGGRRGGRKSGDKRRTKAEKTISLPVLRQYFAGSLKDAAKSIGVCPTTLKRICRQHGITRWPSRKIKKVGHSLRKLQLVIDSVQGAEGAIQIGSFYTSFPELSSANGVSESPKINSDNSKFYSENGLFSNQGVTSTSSCSQSCNPSLNQSTTLINSNNNNIPEIILMSDKQSVVGASMQVHHPPIPISIPIPIQSLDALPPLPQTSSVWNTGGGTFRVKATFGDEKIRFSLQPNCGFRDLQMEIARRFNLKEMSKIQVKYLDDAQEWVLLTCDADLEECKDINRSSQSRTVRLFLFHASPLNHSTNAFGSTSPT

SEQ ID NO: 200 - protein, 902 aa, Vigna angularis
MRDGGVTSSSASMMEAPPPDGTITTTTMDFDYMGELFLDGCWLEASVDGSDFLPQSPSFSNPLFDPSFSWPALETNHDESQGAAFGTQQEGHNNNNNMVNVVVGGGQELQPETITTEGASEGVRRWRFAPTPAPAPGPSIMEKLIRALMWIKDYNRNKNMLIQIWVPVHRGGRPILAANDILFSLDSRSVNLAKYREISVRYEFSAEEGEVKELVPAEKGGSKELLPGLPGRVFRDKVPEWTPDVRFFRSDEYPRVDHAQEYDVRGSLAVPIFEQGSKMCLGVIEVVMTTQQINYTPELESVCKALEAVDLRSSKQLSIHNVKACNRSYEAVLPEIQLVLRSACEMHRLPLAQTWIPCVQQGKEGCRHSEDNYLLCISPVEQACYVGDPKIKPFHESCTEHHLLKGEGVAGGAFVTNQPCFSDDITSLSKKDYPLSHHARLFGLRAAVAIRLRSILNDTDDFVLEFFLPVDCIDSEEQRKMLTSLSIIIQKLCHSLRVISDKELEEANLSIDEMISSVEGGFDRTVICEELQHKGTVASLDTEEKISETTGRKFSDPRQQQESPILKGNFDCVRECSTSVQGNLSSVRMSKMGERRRAKAEKTITLQVLRQYFAGSLKDAAKNIGVCTTTLKRICRQHGIKRWPSRKIKKVGHSLQKLQLVIDSVQGASGAFQIDSFYSNFPELASPNLSGTSMFSTLNQTDNPNSISTQPDPGSLSPEGTSKSPSSSCELQQQHHTTNIAGNKDSTMAGEDSADVALKRIRSEAELKSLNEDKAKLLSRSLSQETLGEHPKNQYERPLLKTSSKVDAHRVKVTYGDEKARFRMPKNWGYEDLVQEIGRRFNVSEMSKFDVKYLDDDSEWVLLTCDADLEECIDVCRSSEKATIKLSLQISSHSLRSSLEFR

SEQ ID NO: 201 - protein, 748 aa, Vigna angularis
MEYGGLVQNCGFGSLWECDSASEEDSIEEVLAEGCWVETSGVGSCEAQYIGSSEAEMEVELRKRWWIGPNKVNSSVKDRLVVAVCYLRECTKNSNLMIQVWVPLRRGLVAGPEYLTRNLDDWVAVEMNMNVNMNSARDVSLRFYRSQEYPRLPYYVDLPGSLALPVFERGTDTCLGVIQILTPPCDTVNYCPQLLNNNLLCNPFQFLPYHSMPCLVTQSEQAFEEVYEAAVNEIVEVMRCVCRAQNVALALSWAPCCIQQGGKCGGYGHSTENHLSTVERACFVGDAQVLGFKEASSQHHLLRGQGIVGTAFTTAKPCFAIDVAAFTRAQYPLAHHANIFGLHAAVAIPLRSLYTDFVVEFFLPKDCRDRENQSHFLSSISLILQQSCRTLHVVMGDEFTLPPLPPPPPPQPQPYVNNKEEIVMSEKSDSQWQAEACGSWIAHMMEAQAQEQKAKGVCVSLEYLEEAKEEFKVTGKCRWESGSSGAYDAVEVQEQHVFGDESQTQTQTQNFGGRRGRKSGEKRRTKAEKTISLPVLRQYFAGSLKDAAKSIGVCPTTLKRICRQHGITRWPSRKIKKVGHSLKKLQLVIDSVQGAEGAIQIGSFYNSFPELSSATSQSKNNNSSNNNSSSLYGHSPPSSSSPSTVPPQQQHLYFSTPNVSQTGLRVKATFGDEKIRFSLQPKWGFRDLEVEIGRRFNVKDLGNLVIKYLDDEGEWVVLACDGDLEECKDLHTTYESRTIRLALFQPSP

SEQ ID NO: 202 - protein, 711 aa, Vigna angularis
MEYGGFSDIFAPETEFMDELFVEGCWVETRVGCGTEASKWNRSMESNGAHIIFEEESEAESLMVGKRWWIGPRGNPGPSSSVKERLVVAVGYLKEYAKNSNMVIQVWVPARRGCEVGIHHHQDFPYTLDYTNNGDATGSFQFHEDWLSDHWPPNIRFLRTHDYTRLHHYDLRPGSLALPVFQRGTGICLGVVDILMPNNVNPDLHNLQGVDFRTPSLQNFIPPAMTVKLGGQGVVGTAFTTSKPCFANDITAFTKAEYPLAHHANMFGLHAAVAIPLRSVSSDFVLEFFLPKDCHDTQDQKQILNSLSMLVQQACRSLHVVLDKEEEEEELVSHHHHHHSKEMESSSWIAHMMEAQQKGKGVSVSLEYLQEPKQEFKVTTNGNEQVFSDLEGTSGAGVGGRRGGRKSGDKRRTKAEKTISLPVLRQYFAGSLKDAAKSIGVCPTTLKRICRQHGITRWPSRKIKKVGHSLRKLQLVIDSVQGAEGAIQIGSFYTSFPELSSANGVSESPKINSDNSKFYSENGLFSNQGVTSTSSCSQSCNPSLNQSTTLINSNNNNIPEIILMSDKQSVVGASMQVHHPPIPISIPIPIQSLDALPPLPQTSSVWNTGGGTFRVKATFGDEKIRFSLQPNCGFRDLQMEIARRFNLKEMSKIQVKYLDDAQEWVLLTCDADLEECKDINRSSQSRTVRLFLFHASPLNHSTNAFGSTSPT

SEQ ID NO: 203 - protein, 917 aa, Vigna angularis
MMRDGGVTSSSASMMEAPPPDGTITTTTMDFDYMGELFLDGCWLEASVDGSDFLPQSPSFSNPLFDPSFSWPALETNHDESQGAAFGTQQEGHNNNNNMVNVVVGGGQELQPETITTEGASEGVRRWRFAPTPAPAPGPSIMEKLIRALMWIKDYNRNKNMLIQIWVPVHRGGRPILAANDILFSLDSRSVNLAKYREISVRYEFSAEEGEVKELVPAEKGGSKELLPGLPGRVFRDKVPEWTPDVRFFRSDEYPRVDHAQEYDVRGSLAVPIFEQGSKMCLGVIEVVMTTQQINYTPELESVCKALEAVDLRSSKQLSIHNVKACNRSYEAVLPEIQLVLRSACEMHRLPLAQTWIPCVQQGKEGCRHSEDNYLLCISPVEQACYVGDPKIKPFHESCTEHHLLKGEGVAGGAFVTNQPCFSDDITSLSKKDYPLSHHARLFGLRAAVAIRLRSILNDTDDFVLEFFLPVDCIDSEEQRKMLTSLSIIIQKLCHSLRVISDKELEEANLSIDEMISSVEGGFDRTVICEELQHKGTVASLDTEEKISETTGRKFSDPRQQQESPILKGNFDCVRECSTSVQGNLSSVRMSKMGERRRAKAEKTITLQVLRQYFAGSLKDAAKNIGVCTTTLKRICRQHGIKRWPSRKIKKVGHSLQKLQLVIDSVQGASGAFQIDSFYSNFPELASPNLSGTSMFSTLNQTDNPNSISTQPDPGSLSPEGTSKSPSSSCGQSSISSHSCSSMSELQQQHHTTNIAGNKDSTMAGEDSADVALKRIRSEAELKSLNEDKAKLLSRSLSQETLGEHPKNQYERPLLKTSSKVDAHRVKVTYGDEKARFRMPKNWGYEDLVQEIGRRFNVSEMSKFDVKYLDDDSEWVLLTCDADLEECIDVCRSSEKATIKLSLQISSHSLRSSLEFR

SEQ ID NO: 204 - protein, 775 aa, Vigna angularis
MGAGWKPLLMDLTSCRKVLPFPIPSLTLHSPGQPWRLTTMNPRVLLLEHNKKATTTTTTWYEFSAEEGEVKELVPAEKGGSKELLPGLPGRVFRDKVPEWTPDVRFFRSDEYPRVDHAQEYDVRGSLAVPIFEQGSKMCLGVIEVVMTTQQINYTPELESVCKALEAVDLRSSKQLSIHNVKACNRSYEAVLPEIQLVLRSACEMHRLPLAQTWIPCVQQGKEGCRHSEDNYLLCISPVEQACYVGDPKIKPFHESCTEHHLLKGEGVAGGAFVTNQPCFSDDITSLSKKDYPLSHHARLFGLRAAVAIRLRSILNDTDDFVLEFFLPVDCIDSEEQRKMLTSLSIIIQKLCHSLRVISDKELEEANLSIDEMISSVEGGFDRTVICEELQHKGTVASLDTEEKISETTGRKFSDPRQQQESPILKGNFDCVRECSTSVQGNLSSVRMSKMGERRRAKAEKTITLQVLRQYFAGSLKDAAKNIGVCTTTLKRICRQHGIKRWPSRKIKKVGHSLQKLQLVIDSVQGASGAFQIDSFYSNFPELASPNLSGTSMFSTLNQTDNPNSISTQPDPGSLSPEGTSKSPSSSCGQSSISSHSCSSMSELQQQHHTTNIAGNKDSTMAGEDSADVALKRIRSEAELKSLNEDKAKLLSRSLSQETLGEHPKNQYERPLLKTSSKVDAHRVKVTYGDEKARFRMPKNWGYEDLVQEIGRRFNVSEMSKFDVKYLDDDSEWVLLTCDADLEECIDVCRSSEKATIKLSLQISSHSLRSSLEFR

SEQ ID NO: 205 - protein, 821 aa, Vigna angularis
  var. angularis
MEYGGFSDIFAPETEFMDELFVEGCWVETRVGCGTEASKWNRSMESNGAHIIFEEESEAESLMVGKRWWIGPRGNPGPSSSVKERLVVAVGYLKEYAKNSNMVIQVWVPARRGCEVGIHHHQDFPYTLDYTNNGDATGSFQFHEDWLSDHWPPNIRFLRTHDYTRLHHYDLRPGSLALPVFQRGTGICLGVVDILMPNNVNPDLHNLQGVDFRTPSLQNFIPPAMTVKGFDELYQGALNEIVQVLTCVCKAHELPLALTWAPCIQQGKSGCGHSNDENYVSTVDPACFVADVDVLGFLEACSEYHLLGGQGVVGTAFTTSKPCFANDITAFTKAEYPLAHHANMFGLHAAVAIPLRSVSSDFVLEFFLPKDCHDTQDQKQILNSLSMLVQQACRSLHVVLDKEEEEEELVSHHHHHHSKEMESSSWIAHMMEAQQKGKGVSVSLEYLQEPKQEFKVTTNGNEQVFSDLEGTSGAGVGGRRGGRKSGDKRRTKAEKTISLPVLRQYFAGSLKDAAKSIGGTWETHTCSFIFYQFPRYYYSVAIHNSLLLIAVCPTTLKRICRQHGITRWPSRKIKKVGHSLRKLQLVIDSVQGAEGAIQIGSFYTSFPELSSANGVSESPKINSDNSKFYSENGLFSNQGVTSTSSCSQSCNPSLNQSTTLINSNNNNIPEIILMSDKQSVVGASMQVHHPPIPISIPIPIQSLDALPPLPQTSSVWNTGGGTFRVKATFGDEKIRFSLQPNCGFRDLQMEIARRFNLKEMSKIQVKYLDDAQEWVLLTCDADLEECKDINRSSQSRTVRLFLFHASPLNHSTNAFGSTSPT

SEQ ID NO: 206 - protein, 920 aa, Vigna radiata
  var. radiata
MMRDGGVTSSSASMTEAPPPDGTITTKTMDFDYMGELFLDGCWLEASVDGSDFLPQSPSFSNPLFDPSFSWPALETNHNESQGAAFGTQQEGHNNNMVNVVVGCGDGGGQELQPETVTTEGTSEGVKRWRFAPTPAPAPGPSIMEKLIRALMWIKDYNRNKNMLIQIWVPVHRGGRPILAANDILFSLDSRSVNLAKYREISVRYEFSAEEGEVKELVPAEKGGSKELLLGLPGRVFRDKVPEWTPDVRFFRSDEYPRVDHAQEYDVRGSLAVPIFEQGSKMCLGVIEVVMTTQQINYTPELESVCKALEAVDLRSSKQLNIHNVKACNRSYEAVLPEIQLVLRSACEMHRLPLAQTWIPCVQQGKEGCRHSEDNYLLCISPVEHACYVGDPKIRPFHESCTEHHLLKGEGVAGGAFITNQPCFSDDITSLSKKDYPLSHHARLFGLRAAVAIRLRSILNDTDDFVLEFFLPVDCSDSEEQRKMLTSLSIIIQRLCRSLRVISDKELEEANSSIDEMIFLADGGFDRTVICEELQHKGTVALWNTEEKLSETTGRKFSDPRQQQQESLNFKGNLDCVRECSTSVQGNLSSVGMSKMGERRRAKGEKTITLQVLRQYFAGSLKDAAKNIGVCTTTLKRICRQHGIKRWPSRKIKKVGHSLQKLQLVIDSVQGASGAFQIDSFYSNFPELASPNLSGTSMFSTPNQTDNPNSISTQPDPGSLSPEGTSKSPSSSCGQSSISSHSCFSMSELRQQHHTTDISGNKDSTMAGEDSLDVALKRIRSEAELKSLNQDKAELLPRSLSQETLGEHPKNQYERPLLKTSSKVDAHRVKVTYGDEKTRFRMPKNWGYEDLMQEIGRRFNVSEMSKFDVKYLDDDSEWVLLTCDADLEECIDVCRSSENATIKLSLQISSHSLRSSLEFR

SEQ ID NO: 207 - protein, 783 aa, Vigna radiata
  var. radiata
MEYGGFSDIFAPETEFMDELFAEGCWVETRVGCGTEASKWNRSMESNGAHIIFEEESEAESLMVGKRWWIGPRGNPGPSSSVKERLVVAVGYLKEYAKNSNMVIQVWVPARRGCEVGIHHHQDFPYTLDYISNGDATRSFQFHEEWLSDHWPPNIRFLRTHDYPRLHHYDLRPGSLAIPVFQRGTGICLGVVDILMPNNVNPDLHNLQDVDFRSPSLQNFIPSAMTGFDELYQGALNEIVQVLTCVCKAHELPLALTWAPCIQQGKSGCGHSNDENYVSTVDPASFVADVDVLGFLEACSEYHLLGGQGVVGTAFTTSKPCFANDITAFTKAEYPLAHHANMFGLHAAVAIPLRSVSSDFVLEFFLPKDCHDTQDQKQILNSLSMLVQQACRSLHVVLDKEEEEELVSHHHHHHSKEMESSSWIAHMMEAQQKGKGVSVSLEYLQEPKQEFKVTTNCNEQVFSDLEGTGGAGVGGRRGGRKSGDKRRTKAEKTISLPVLRQYFAGSLKDAAKSIGVCPTTLKRICRQHGITRWPSRKIKKVGHSLRKLQLVIDSVQGAEGAIQIGSFYTSFPELSANGVSESPKINSDNSKFYSENGLFSNQGVTSTSSCSQSCNPSLNQSTTLINSNNNNNPEIILMSDKQSGASMQVHHPPIPISIPIPIQSLDALPPLPQTSSVWNTDGGTFRVKATFGDEKIRFSLQPNCGFRDLQMEIARRFNLKEMSKIQVKYLDDAQEWVLLTCDADLEECKDINRSSQSRTVRLFLFHASPLNHSTNAFGSTSPT

SEQ ID NO: 208 - protein, 904 aa, Vigna radiata
  var. radiata
MMRDGGVTSSSASMTEAPPPDGTITTKTMDFDYMGELFLDGCWLEASVDGSDFLPQSPSFSNPLFDPSFSWPALETNHNESQGAAFGTQQEGHNNNMVNVVVGCGDGGGQELQPETVTTEGTSEGVKRWRFAPTPAPAPGPSIMEKLIRALMWIKDYNRNKNMLIQIWVPVHRGGRPILAANDILFSLDSRSVNLAKYREISVRYEFSAEEGEVKELVPAEKGGSKELLLGLPGRVFRDKVPEWTPDVRFFRSDEYPRVDHAQEYDVRGSLAVPIFEQGSKMCLGVIEVVMTTQQINYTPELESVCKALEACNRSYEAVLPEIQLVLRSACEMHRLPLAQTWIPCVQQGKEGCRHSEDNYLLCISPVEHACYVGDPKIRPFHESCTEHHLLKGEGVAGGAFITNQPCFSDDITSLSKKDYPLSHHARLFGLRAAVAIRLRSILNDTDDFVLEFFLPVDCSDSEEQRKMLTSLSIIIQRLCRSLRVISDKELEEANSSIDEMIFLADGGFDRTVICEELQHKGTVALWNTEEKLSETTGRKFSDPRQQQQESLNFKGNLDCVRECSTSVQGNLSSVGMSKMGERRRAKGEKTITLQVLRQYFAGSLKDAAKNIGVCTTTLKRICRQHGIKRWPSRKIKKVGHSLQKLQLVIDSVQGASGAFQIDSFYSNFPELASPNLSGTSMFSTPNQTDNPNSISTQPDPGSLSPEGTSKSPSSSCGQSSISSHSCFSMSELRQQHHTTDISGNKDSTMAGEDSLDVALKRIRSEAELKSLNQDKAELLPRSLSQETLGEHPKNQYERPLLKTSSKVDAHRVKVTYGDEKTRFRMPKNWGYEDLMQEIGRRFNVSEMSKFDVKYLDDDSEWVLLTCDADLEECIDVCRSSENATIKLSLQISSHSLRSSLEFR

SEQ ID NO: 209 - protein, 732 aa, Vigna radiata
  var. radiata
MEYGGLVQNCGFGSLWECDSASEEDSIEEVLAEGCWVETSGVGSCEAQYIGSSEAEMEVELRKRWWIGPNKANSSVKDRLVVAVCYLRECTKNSNLMIQVWVPLRRGLVAGPEYLTRNLDDWVAVEMNMNVNMNSARDVSLRFYRSQEYPRLPYYVDLPGSLALPVFERGTDTCLGVIQILTPPCDTINYCPQLLNNNLLCNPFQAFEEVYEAAVNEIVEVMRCVCRAQNVALALSWAPCCIQQGGKCGGYGHSTENHLSIVERACFVGDAQVLGFKEASSQHHLLRGQGIVGTAFTTAKPCFAIDVAAFTRAQYPLAHHANIFGLHAAVAIPLRSLYTDFVVEFFLPKDCRDREHQSHFLSSISLILQQSCRTLHVVMGDEFTLPPLPPPPPPQPQPYVNNKEEIVMSEKSDSQWQAEACGSWIAHMMEAQAQEQKAKGVCVSLEYLEEAKEEFKVTGKCRWESGSGSAYDAVEVQEQHMFGDESQTQTQTQNFGGRRGRKSGEKRRTKAEKTISLPVLRQYFAGSLKDAAKSIGVCPTTLKRICRQHGITRWPSRKIKKVGHSLKKLQLVIDSVQGAEGAIQIGSFYNSFPELSSATSQSKNNNSSNNNSSSLYGHSPPSSSSPSTVPPQQQHLYFSTPNVSQTGLRVKATFGDEKIRFSLQPKWGFRDLEVEIGRRFNVKDLGNLVVKYLDDEGEWVVLACDGDLEECKDLHTTYESRTIRLALFQPSP

SEQ ID NO: 210 - protein, 872 aa, Zea mays
MQCVRDELCRAGSEESVTCICMEEGGDPQLPSISVARTTSEGAGAVDLDLLEQLLSGDNGWLEVVSRSPNSVAFPPPSAFFSADATATTVTTTAAPAANASWLIQTGGASTPSVRERFSQALSYIRDTQSDGDVLVQLWVPVNRDDGKLVLTTSGQPFTLDHRSDSLIRFREVSTKYQFPADVRSGESPGLPGRVFIGRLPEWSPDIRCFTSYEYARVTDAKYLDVHGTMGLPVFEKRSYSCLGVIELIMTKQKLNFTSELNTICSALQAVNLRSTEVSSIPRKKFSTASYKDALPEILEVLRAACLTHKLPLAQTWVTCTQQGKRGSRHSDENYRYCISTIDEACFVNEAEMRGFHEACSEHHLLRGEGVAGKALTTNQPCFLPDIGSSTKLEYPLSHHAKIFRLKGAVAIRLRCTRTGIADFVLEFFLPTDCEALEEQKTVLDSLSGTMRSVCQTLRVVTDREMEGEAALEMNELNSFTPPEKDKDELSFGGNSADRRGASWTSLAGTSQQEPELAALRMHGTFSPVGQGPSLSGVQATAEGSKTKRRTKAEKTVSLQVLRQYFAGSLKDAARSLGVCPTTLKRICRQHGITRWPSRKIKKVDHSLRKLQQIIDSVHGAETAFQLNTLYKDLTDTSISSDNNLSGSVTVPPTNQSNLTDFNKHQPHKSSSNMPSTSHSHSSCSHGSQSSPSCSVGATEHAQQGIIDLMKSENPVKDSSIQTMQTENTSLYEHFSVHEAPIDLLQDVTEKANGAHHSSRSLSSPNPKQNTDANMRVKATFGSEKVRFRLNPECNFQGLKHELAKRLSIVDTNPLVLKYLDDDSEWVLMTCDADLQECLHVYKLADIQTIKISVHLAVSPATRVTAGHTGLS

SEQ ID NO: 211 - protein, 851 aa, Zea mays
MEEGGDPQLPSISAPRTTSEGAGGVDLDLLEQLLSGDNGWLEVVSRSPNSVAFPPLSAFFSADATATTVTTAAPAANASWWIQTGGASPSSVEERFSQALSYIRDTQSDGDVLVQLWVPVNRDDGKLVLTTSEQPFTLDHRSDSLLRFREVSTKYQFSADVKSGDSPGLPGRVFIGRLPEWSPDIRYFTSYEYPRVRDAQYLDVHGTMGLPVFEKGSYNCLGVIELIMTRQKINFTSELNTICSALQAVNLRSTEVSSIPRIKFSTASYKDALPEILEVLRAACLTHKLPLAQTWVTCAQQGKRGSRHSDENYRYCISTIDEACFVNEAEMRGFHEACSEHHLLRGEGVAGKAFTTNQPCFLPDIGSSTKLEYSLSHHAKIFKLKGAVAIRLRCTRTGTADFVLEFFLPTDCEALEEQKSVLDSLSGTMRSVCQTLRVVTDREMEDETVLEMNELNSFTPHGKDKVELSFGCNSADRRGEASWTSLAGTSQQESELAALRMHGMFSPGGQGPSLSGVQATAEGSKAKRRTKAEKTVSLQILRQYFAGSLKDAARSLGVCPTTLKRICRQHGITRWPSRKIKKVDHSLRKLQQIIDSVHGAETAFQLNTLYKDITNTSISSDNNLSGSVTVPPTNQSNLTDVNKHQPHKSSSNVPSTSHSHSSCSHSSESSPSCSGGATKHAQQGIIDQMKSENPVKDSSIQTLQTENTSLFEHFSVNETPIDLLQDVTEKANGGHHSSRSPSSPNPKQNTDANMRVKATFGSEKVRFRLNPECNFQELKHEIAKRLSIVDTNPLVLKYLDDDSEWVLMTCDADLQECLHVYKLAGIQTIKISVHLAVSPATRVTTGHTGLS

SEQ ID NO: 212 - protein, 521 aa, Zea mays
MEALKIARKTTSKLPAHTLGFLPPAFPRGHSHFAHCLCAKHDTGKGVPWPDAGSKGDLNLTDECAQGHHRKAGSLSSTLSLDNGDGAGETNDAEKPVLKGELPASAWKREETHSFRASPHAPRPKARGVDLDLLEQLLSDDNGWLEVVSRSPNSVAFPPLSAFFSADATATTVTTAATAANASWWIQTGGASPSSVEEQFSQAMSYIRDMQSDGDVLVQLWVPVNHDDGKLVLTTSEQPFTLDHRSDSLLRFREVSTKYQFSADVKSGDSPGLPGRVFISRLPEWQKINFTSELNTICSALQFSTASYKDALPEILEVLRAACLTHKLPLAQTWVTCAQQGKRGSRHSDENYRYCISTIDEACFVNEAETRGFHETCSEHHLLHYEALEEQKTVLDSLSGTMRSVCQTLRVVTDREMEDEAVLEMNELNSFTPHGKDKVELSFGGNSADRRGEASWTSLAGTSQQESELAALRMHGMFSPGGRVHLYLVFRQLLKVARQKGVQRPRRPLVCRFFGSTSLVA

SEQ ID NO: 213 - protein, 535 aa, Zea mays
MEEGGDPQLPSISARTTSEGAGGVDLDLLEQLLSDDNGWLETGGASPSSVEEQFSQALSYIRDTQSDGDVLVQLWVPVNHDDGKLVLTTSEQPFTLDHRSDSLLRFREVSTKYQFSANVKSGDSPGLSGRVFIGRLPEWSPDIRYFTSYEYPRVRDAQYLDVHGTMGLPVFEKGSYNCLGVIELIMIRQKINFTSELNTICSALQFSTASYKDALPEILEVLRAACLTHKLPLAQTWVTCAQQGKRGNRHSDENYRYCISTIDEACFVNEAEMRGFHETCSEHHLLRGEGLKGAVAIRLRCTRTGTTDFVLEFFLPTDCEALEDQNIVLDSLSGTMRSVCQTLRVVTNREMEDEAVLEMNELNSFTPHGKDKVELSFGGNSADRRGEASWTSLAGTSQQESELAALRMHGMFSPGGQGPSLSGVQATAEGSKAKRRTKAEKTVSLQILRQYFAGSLKDAARSLGGDNSRSAGIMSLSRLCVYGSSSITYVLSARGTSGELVLFVRRPEMVLDYGGIQPLLFNSLSSLTKWMKMEI

SEQ ID NO: 214 - protein, 902 aa, Zea mays
MEQAPQTHGGGGLLACGVMEDVAVGDLDLMEELFMAAPGFDFSDFSQPGAGGESPGVCFSPLFDICSTTTTATPPPPPPSGDDNRDQPTPPRRGWVFQPRLEVDATVKERLRRALERIASLSQTQPGELLAQVWVPTVIGDRQVLTTCGQPFWLDCRNERLANYRTVSMKYQFSADETARTDLGMPGRVFVGRVPEWTPDVRYFSTEEYPRVHHAQYFDIRGSVALPIFEPRSRVCLGVVELVMTTEKVNYNAEIQNICSALKEVDLRSSDVSSDSRAKVTDTSYRAIIPEIVDVLRTVCETHKLPLAQTWIPCICQAKRGSRHTDEKLKYCVSTLDEACYVRDLNVNGFHEACSEHHLFRGEGVVGRAFATNEPCFSEDITASSKIQYPLSHHAKLFSLRAAVAIRLRSISTGSLDYVLEFFLPVDCIEIEEQRAMLNSLSITIQQTCYTLRVVSLKELVDEGSIETSALTPPEYDKSMHENIDEVCSGIGVPARTASLETSEEVSSWIASLVCAQNKGVKEMDGDLPFGFSKQEDEGFSVTAGWHTSPVIEPEGSIFSGFKQHEEYKVKEVTCLRDPSSSNLEKTVEKRRTKMEKTVSLEELRKHFAGSLKEAAKNLGVCPTTLKRICRQHGINRWPSRKIKKVGHSLKKLQMVIDSVHGSEGTVQLSSLYENFTKTTWSERELQGDATYPLSEEKGPLEPSVPDRYCEGRFTSHTSGSNSLSPSCSQSSNSSHGCSSGSKSQQHVSAPQLAVKKEVFMEENQSSTLLKAASHAELQMLPEERLVTLPRSHSQVLLSEQKPVENITGMQMSKPDSLKIKAMYGEERCIFRLQPSWGFEKLKEEILKRFGIAREVYVDLKYLDDESEWVLLTCNADLLECIDVYKSSSTQTVRILVHSSDQ

SEQ ID NO: 215 - protein, 942 aa, Zea mays
MEQAPQTHGGGGLLACGVMEDVAVGDLDLMEELFMAAPGFDFSDFSQPGAGGESPGVCFSPLFDICSTTTTATPPPPPPSGDDNRDQPTPPRRGWVFQPRLEVDATVKERLRRALERIASLSQTQPGELLAQVWVPTVIGDRQVLTTCGQPFWLDCRNERLANYRTVSMKYQFSADETARTDLGMPGRVFVGRVPEWTPDVRYFSTEEYPRVHHAQYFDIRGSVALPIFEPRSRVCLGVVELVMTTEKVNYNAEIQNICSALKEVDLRSSDVSSDSRAKVTDTSYRAIIPEIVDVLRTVCETHKLPLAQTWIPCICQAKRGSRHTDEKLKYCVSTLDEACYVRDLNVNGFHEACSEHHLFRGEGVVGRAFATNEPCFSEDITASSKIQYPLSHHAKLFSLRAAVAIRLRSISTGSLDYVLEFFLPVDCIEIEEQRAMLNSLSITIQQTCYTLRVVSLKELVDEGSIETSALTPPEYDKSMHENIDEVCSGIGVPARTASLETSEEVSSWIASLVCAQNKGVKEMDGDLPFGFSKQEDEGFSVTAGWHTSPVIEPEGSIFSGFKQHEEYKVKEVTCLRDPSSSNLEKTVEKRRTKMEKTVSLEELRKHFAGSLKEAAKNLGVCPTTLKRICRQHGINRWPSRKIKKVGHSLKKLQMVIDSVHGSEGTVQLSSLYENFTKTTWSERELQGDATYPLSEEKGPLEPSVPDRYCEGRFTSHTSGSNSLSPSCSQSSNSSHGCSSGSKSQQHVSAPQLAVKKEVFMEENQSSTLLKAASHAELQMLPEERLVTLPRSHSQVLLSEQKPVENITGMQMSKPDSLKIKAMYGEERCIFRLQPSWGFEKLKEEILKRFGIAREVYVDLKYLDDESEWVLLTCNADLLECIDVYKSSSTQTVRILVHSSDHKLHTVFDITEDGTSVPLVQFVNSTGRRVESVGICRYEALD

SEQ ID NO: 216 - protein, 860 aa, Zea mays
MEQAPQTHGGESPGVCFSPLFDICSTTTTATPPPPPPSGDDNRDQPTPPRRGWVFQPRLEVDATVKERLRRALERIASLSQTQPGELLAQVWVPTVIGDRQVLTTCGQPFWLDCRNERLANYRTVSMKYQFSADETARTDLGMPGRVFVGRVPEWTPDVRYFSTEEYPRVHHAQYFDIRGSVALPIFEPRSRVCLGVVELVMTTEKVNYNAEIQNICSALKEVDLRSSDVSSDSRAKVTDTSYRAIIPEIVDVLRTVCETHKLPLAQTWIPCICQAKRGSRHTDEKLKYCVSTLDEACYVRDLNVNGFHEACSEHHLFRGEGVVGRAFATNEPCFSEDITASSKIQYPLSHHAKLFSLRAAVAIRLRSISTGSLDYVLEFFLPVDCIEIEEQRAMLNSLSITIQQTCYTLRVVSLKELVDEGSIETSALTPPEYDKSMHENIDEVCSGIGVPARTASLETSEEVSSWIASLVCAQNKGVKEMDGDLPFGFSKQEDEGFSVTAGWHTSPVIEPEGSIFSGFKQHEEYKVKEVTCLRDPSSSNLEKTVEKRRTKMEKTVSLEELRKHFAGSLKEAAKNLGVCPTTLKRICRQHGINRWPSRKIKKVGHSLKKLQMVIDSVHGSEGTVQLSSLYENFTKTTWSERELQGDATYPLSEEKGPLEPSVPDRYCEGRFTSHTSGSNSLSPSCSQSSNSSHGCSSGSKSQQHVSAPQLAVKKEVFMEENQSSTLLKAASHAELQMLPEERLVTLPRSHSQVLLSEQKPVENITGMQMSKPDSLKIKAMYGEERCIFRLQPSWGFEKLKEEILKRFGIAREVYVDLKYLDDESEWVLLTCNADLLECIDVYKSSSTQTVRILVHSSDQ

SEQ ID NO: 217 - protein, 643 aa, Zea mays
MGLPVFEKRSYSCLGVIELIMTKQKLNFTSELNTICSALQAVNLRSTEVSSIPRKKFSTASYKDALPEILEVLRAACLTHKLPLAQTWVTCTQQGKRGSRHSDENYRYCISTIDEACFVNEAEMRGFHEACSEHHLLRGEGVAGKALTTNQPCFLPDIGSSTKLEYPLSHHAKIFRLKGAVAIRLRCTRTGIADFVLEFFLPTDCEALEEQKTVLDSLSGTMRSVCQTLRVVTDREMEGEAALEMNELNSFTPPEKDKDELSFGGNSADRRGASWTSLAGTSQQEPELAALRMHGTFSPVGQGPSLSGVQATAEGSKTKRRTKAEKTVSLQVLRQYFAGSLKDAARSLGVCPTTLKRICRQHGITRWPSRKIKKVDHSLRKLQQIIDSVHGAETAFQLNTLYKDLTDTSISSDNNLSGSVTVPPTNQSNLTDFNKHQPHKSSSNMPSTSHSHSSCSHGSQSSPSCSVGATEHAQQGIIDLMKSENPVKDSSIQTMQTENTSLYEHFSVHEAPIDLLQDVTEKANGAHHSSRSLSSPNPKQNTDANMRVKATFGSEKVRFRLNPECNFQGLKHELAKRLSIVDTNPLVLKYLDDDSEWVLMTCDADLQECLHVYKLADIQTIKISVHLAVSPATRVTAGHTGLS

SEQ ID NO: 218 - protein, 580 aa, Zea mays
MQCVRDELCRAGSEESVTCICMEEGGDPQLPSISVARTTSEGAGAVDLDLLEQLLSGDNGWLEVVSRSPNSVAFPPPSAFFSADATATTVTTTAAPAANASWLIQTGGASTPSVRERFSQALSYIRDTQSDGDVLVQLWVPVNRDDGKLVLTTSGQPFTLDHRSDSLIRFREVSTKYQFPADVRSGESPGLPGRVFIGRLPEWSPDIRCFTSYEYARVTDAKYLDVHGTMGLPVFEKRSYSCLGVIELIMTKQKLNFTSELNTICSALQAVNLRSTEVSSIPRKKFSTASYKDALPEILEVLRAACLTHKLPLAQTWVTCTQQGKRGSRHSDENYRYCISTIDEACFVNEAEMRGFHEACSEHHLLRGEGVAGKALTTNQPCFLPDIGSSTKLEYPLSHHAKIFRLKGAVAIRLRCTRTGIADFVLEFFLPTDCEALEEQKTVLDSLSGTMRSVCQTLRVVTDREMEGEAALEMNELNSFTPPEKDKDELSFGGNSADRRGASWTSLAGTSQQEPELAALRMHGTFSPVGQGPSLSGVQATAEGSKTKRRTKAEKTVSLQVLRQYFAGSLKDAARSLGGE

SEQ ID NO: 219 - protein, 636 aa, Zea mays
MFVKKKLWTFQFTYPSSNIKQVYKILRHETAMLIYAHMTSWPLLLIVHQFSTASYKDALPEILEVLRAACLTHKLPLAQTWVTCTQQGKRGSRHSDENYRYCISTIDEACFVNEAEMRGFHEACSEHHLLRGEGVAGKALTTNQPCFLPDIGSSTKLEYPLSHHAKIFRLKGAVAIRLRCTRTGIADFVLEFFLPTDCEALEEQKTVLDSLSGTMRSVCQTLRVVTDREMEGEAALEMNELNSFTPPEKDKDELSFGGNSADRRGASWTSLAGTSQQEPELAALRMHGTFSPVGQGPSLSGVQATAEGSKTKRRTKAEKTVSLQVLRQYFAGSLKDAARSLGVCPTTLKRICRQHGITRWPSRKIKKVDHSLRKLQQIIDSVHGAETAFQLNTLYKDLTDTSISSDNNLSGSVTVPPTNQSNLTDFNKHQPHKSSSNMPSTSHSHSSCSHGSQSSPSCSVGATEHAQQGIIDLMKSENPVKDSSIQTMQTENTSLYEHFSVHEAPIDLLQDVTEKANGAHHSSRSLSSPNPKQNTDANMRVKATFGSEKVRFRLNPECNFQGLKHELAKRLSIVDTNPLVLKYLDDDSEWVLMTCDADLQECLHVYKLADIQTIKISVHLAVSPATRVTAGHTGLS

SEQ ID NO: 220 - protein, 686 aa, Zea mays
MEEGGDPQLPSISVARTTSEGAGAVDLDLLEQLLSGDNGWLEVVSRSPNSVAFPPPSAFFSADATATTVTTTAAPAANASWLIQTGGASTPSVRERFSQALSYIRDTQSDGDVLVQLWVPVNRDDGKLVLTTSGQPFTLDHRSDSLIRFREVSTKYQFPADVRSGESPGLPGRVFIGRLPEWSPDIRCFTSYEYARVTDAKYLDVHGTMGLPVFEKRSYSCLGVIELIMTKQKLNFTSELNTICSALQAVNLRSTEVSSIPRKKFSTASYKDALPEILEVLRAACLTHKLPLAQTWVTCTQQGKRGSRHSDENYRYCISTIDEACFVNEAEMRGFHEACSEHHLLRGEGVAGKALTTNQPCFLPDIGSSTKLEYPLSHHAKIFRLKGAVAIRLRCTRTGIADFVLEFFLPTDCEALEEQKTVLDSLSGTMRSVCQTLRVVTDREMEGEAALEMNELNSFTPPEKDKDELSFGGNSADRRGASWTSLAGTSQQEPELAALRMHGTFSPVGQGPSLSGVQATAEGSKTKRRTKAEKTVSLQVLRQYFAGSLKDAARSLGVCPTTLKRICRQHGITRWPSRKIKKVDHSLRKLQQIIDSVHGAETAFQLNTLYKDLTDTSISSDNNLSGSVTVPPTNQSNLTDFNKHQPHKSSSNMPSTSHSHSSCSHGSQSSPSCSVGATEHAQQGCY

SEQ ID NO: 221 - protein, 868 aa, Zea mays
MCMEQNRSSEESVTCICMEEGGDPQLPSISVARTTSEGAGAVDLDLLEQLLSGDNGWLEVVSRSPNSVAFPPPSAFFSADATATTVTTTAAPAANASWLIQTGGASTPSVRERFSQALSYIRDTQSDGDVLVQLWVPVNRDDGKLVLTTSGQPFTLDHRSDSLIRFREVSTKYQFPADVRSGESPGLPGRVFIGRLPEWSPDIRCFTSYEYARVTDAKYLDVHGTMGLPVFEKRSYSCLGVIELIMTKQKLNFTSELNTICSALQAVNLRSTEVSSIPRKKFSTASYKDALPEILEVLRAACLTHKLPLAQTWVTCTQQGKRGSRHSDENYRYCISTIDEACFVNEAEMRGFHEACSEHHLLRGEGVAGKALTTNQPCFLPDIGSSTKLEYPLSHHAKIFRLKGAVAIRLRCTRTGIADFVLEFFLPTDCEALEEQKTVLDSLSGTMRSVCQTLRVVTDREMEGEAALEMNELNSFTPPEKDKDELSFGGNSADRRGASWTSLAGTSQQEPELAALRMHGTFSPVGQGPSLSGVQATAEGSKTKRRTKAEKTVSLQVLRQYFAGSLKDAARSLGVCPTTLKRICRQHGITRWPSRKIKKVDHSLRKLQQIIDSVHGAETAFQLNTLYKDLTDTSISSDNNLSGSVTVPPTNQSNLTDFNKHQPHKSSSNMPSTSHSHSSCSHGSQSSPSCSVGATEHAQQGIIDLMKSENPVKDSSIQTMQTENTSLYEHFSVHEAPIDLLQDVTEKANGAHHSSRSLSSPNPKQNTDANMRVKATFGSEKVRFRLNPECNFQGLKHELAKRLSIVDTNPLVLKYLDDDSEWVLMTCDADLQECLHVYKLADIQTIKISVHLAVSPATRVTAGHTGLS

SEQ ID NO: 222 - protein, 861 aa, Zea mays
MQCVRDELCRAGSEESVTCICMEEGGDPQLPSISVARTTSEGAGAVDLDLLEQLLSGDNGWLEVVSRSPNSVAFPPPSAFFSADATATTVTTTAAPAANASWLIQTGGASTPSVRERFSQALSYIRDTQSDGDVLVQLWVPVNRDDGKLVLTTSGQPFTLDHRSDSLIRFREVSTKYQFPADVRSGESPGLPGRVFIGRLPEWSPDIRCFTSYEYARVTDAKYLDVHGTMGLPVFEKRSYSCLGVIELIMTKQKLNFTSELNTICSALQAVNLRSTEVSSIPRKKFSTASYKDALPEILEVLRAACLTHKLPLAQTWVTCTQQGKRGSRHSDENYRYCISTIDEACFVNEAEMRGFHEACSEHHLLRGEGVAGKALTTNQPCFLPDIGSSTKLEYPLSHHAKIFRLKGAVAIRLRCTRTGIADFVLEFFLPTDCEALEEQKTVLDSLSGTMRSVCQTLRVVTDREMEGEAALEMNELNSFTPPEKDKDELSFGGNSADRRGASWTSLAGTSQQEPELAALRMHGTFSPVGQGPSLSGVQATAEGSKTKRRTKAEKTVSLQVLRQYFAVCPTTLKRICRQHGITRWPSRKIKKVDHSLRKLQQIIDSVHGAETAFQLNTLYKDLTDTSISSDNNLSGSVTVPPTNQSNLTDFNKHQPHKSSSNMPSTSHSHSSCSHGSQSSPSCSVGATEHAQQGIIDLMKSENPVKDSSIQTMQTENTSLYEHFSVHEAPIDLLQDVTEKANGAHHSSRSLSSPNPKQNTDANMRVKATFGSEKVRFRLNPECNFQGLKHELAKRLSIVDTNPLVLKYLDDDSEWVLMTCDADLQECLHVYKLADIQTIKISVHLAVSPATRVTAGHTGLS

SEQ ID NO: 223 - protein, 559 aa, Zea mays
MEEGGDPQLPSISVARTTSEGAGAVDLDLLEQLLSGDNGWLEVVSRSPNSVAFPPPSAFFSADATATTVTTTAAPAANASWLIQTGGASTPSVRERFSQALSYIRDTQSDGDVLVQLWVPVNRDDGKLVLTTSGQPFTLDHRSDSLIRFREVSTKYQFPADVRSGESPGLPGRVFIGRLPEWSPDIRCFTSYEYARVTDAKYLDVHGTMGLPVFEKRSYSCLGVIELIMTKQKLNFTSELNTICSALQAVNLRSTEVSSIPRKKFSTASYKDALPEILEVLRAACLTHKLPLAQTWVTCTQQGKRGSRHSDENYRYCISTIDEACFVNEAEMRGFHEACSEHHLLRGEGVAGKALTTNQPCFLPDIGSSTKLEYPLSHHAKIFRLKGAVAIRLRCTRTGIADFVLEFFLPTDCEALEEQKTVLDSLSGTMRSVCQTLRVVTDREMEGEAALEMNELNSFTPPEKDKDELSFGGNSADRRGASWTSLAGTSQQEPELAALRMHGTFSPVGQGPSLSGVQATAEGSKTKRRTKAEKTVSLQVLRQYFAGSLKDAARSLGGE

SEQ ID NO: 224 - protein, 600 aa, Zea mays
MTSWQLLLIIHQFSTASYKDALPEILEVLRAACLTHKLPLAQTWVTCAQQGKRGSRHSDENYRYCISTIDEACFVNEAEMRGFHEACSEHHLLRGEGVAGKAFTTNQPCFLPDIGSSTKLEYSLSHHAKIFKLKGAVAIRLRCTRTGTADFVLEFFLPTDCEALEEQKSVLDSLSGTMRSVCQTLRVVTDREMEDETVLEMNELNSFTPHGKDKVELSFGCNSADRRGEASWTSLAGTSQQESELAALRMHGMFSPGGQGPSLSGVQATAEGSKAKRRTKAEKTVSLQILRQYFAGSLKDAARSLGVCPTTLKRICRQHGITRWPSRKIKKVDHSLRKLQQIIDSVHGAETAFQLNTLYKDITNTSISSDNNLSGSVTVPPTNQSNLTDVNKHQPHKSSSNVPSTSHSHSSCSHSSESSPSCSGGATKHAQQGIIDQMKSENPVKDSSIQTLQTENTSLFEHFSVNETPIDLLQDVTEKANGGHHSSRSPSSPNPKQNTDANMRVKATFGSEKVRFRLNPECNFQELKHEIAKRLSIVDTNPLVLKYLDDDSEWVLMTCDADLQECLHVYKLAGIQTIKISVHLAVSPATRVTTGHTGLS

SEQ ID NO: 225 - protein, 644 aa, Zea mays
MGLPVFEKGSYNCLGVIELIMTRQKINFTSELNTICSALQAVNLRSTEVSSIPRIKFSTASYKDALPEILEVLRAACLTHKLPLAQTWVTCAQQGKRGSRHSDENYRYCISTIDEACFVNEAEMRGFHEACSEHHLLRGEGVAGKAFTTNQPCFLPDIGSSTKLEYSLSHHAKIFKLKGAVAIRLRCTRTGTADFVLEFFLPTDCEALEEQKSVLDSLSGTMRSVCQTLRVVTDREMEDETVLEMNELNSFTPHGKDKVELSFGCNSADRRGEASWTSLAGTSQQESELAALRMHGMFSPGGQGPSLSGVQATAEGSKAKRRTKAEKTVSLQILRQYFAGSLKDAARSLGVCPTTLKRICRQHGITRWPSRKIKKVDHSLRKLQQIIDSVHGAETAFQLNTLYKDITNTSISSDNNLSGSVTVPPTNQSNLTDVNKHQPHKSSSNVPSTSHSHSSCSHSSESSPSCSGGATKHAQQGIIDQMKSENPVKDSSIQTLQTENTSLFEHFSVNETPIDLLQDVTEKANGGHHSSRSPSSPNPKQNTDANMRVKATFGSEKVRFRLNPECNFQELKHEIAKRLSIVDTNPLVLKYLDDDSEWVLMTCDADLQECLHVYKLAGIQTIKISVHLAVSPATRVTTGHTGLS

SEQ ID NO: 226 - protein, 559 aa, Zea mays
MEEGGDPQLPSISAPRTTSEGAGGVDLDLLEQLLSGDNGWLEVVSRSPNSVAFPPLSAFFSADATATTVTTAAPAANASWWIQTGGASPSSVEERFSQALSYIRDTQSDGDVLVQLWVPVNRDDGKLVLTTSEQPFTLDHRSDSLLRFREVSTKYQFSADVKSGDSPGLPGRVFIGRLPEWSPDIRYFTSYEYPRVRDAQYLDVHGTMGLPVFEKGSYNCLGVIELIMTRQKINFTSELNTICSALQAVNLRSTEVSSIPRIKFSTASYKDALPEILEVLRAACLTHKLPLAQTWVTCAQQGKRGSRHSDENYRYCISTIDEACFVNEAEMRGFHEACSEHHLLRGEGVAGKAFTTNQPCFLPDIGSSTKLEYSLSHHAKIFKLKGAVAIRLRCTRTGTADFVLEFFLPTDCEALEEQKSVLDSLSGTMRSVCQTLRVVTDREMEDETVLEMNELNSFTPHGKDKVELSFGCNSADRRGEASWTSLAGTSQQESELAALRMHGMFSPGGQGPSLSGVQATAEGSKAKRRTKAEKTVSLQILRQYFAGSLKDAARSLGGE

SEQ ID NO: 227 - protein, 686 aa, Zea mays
MEEGGDPQLPSISAPRTTSEGAGGVDLDLLEQLLSGDNGWLEVVSRSPNSVAFPPLSAFFSADATATTVTTAAPAANASWWIQTGGASPSSVEERFSQALSYIRDTQSDGDVLVQLWVPVNRDDGKLVLTTSEQPFTLDHRSDSLLRFREVSTKYQFSADVKSGDSPGLPGRVFIGRLPEWSPDIRYFTSYEYPRVRDAQYLDVHGTMGLPVFEKGSYNCLGVIELIMTRQKINFTSELNTICSALQAVNLRSTEVSSIPRIKFSTASYKDALPEILEVLRAACLTHKLPLAQTWVTCAQQGKRGSRHSDENYRYCISTIDEACFVNEAEMRGFHEACSEHHLLRGEGVAGKAFTTNQPCFLPDIGSSTKLEYSLSHHAKIFKLKGAVAIRLRCTRTGTADFVLEFFLPTDCEALEEQKSVLDSLSGTMRSVCQTLRVVTDREMEDETVLEMNELNSFTPHGKDKVELSFGCNSADRRGEASWTSLAGTSQQESELAALRMHGMFSPGGQGPSLSGVQATAEGSKAKRRTKAEKTVSLQILRQYFAGSLKDAARSLGVCPTTLKRICRQHGITRWPSRKIKKVDHSLRKLQQIIDSVHGAETAFQLNTLYKDITNTSISSDNNLSGSVTVPPTNQSNLTDVNKHQPHKSSSNVPSTSHSHSSCSHSSESSPSCSGGATKHAQQGCY

SEQ ID NO: 228 - protein, 841 aa, Zea mays
MEEGGDPQLPSISVARTTSEGAGAVDLDLLEQLLSGDNGWLEVVSRSPNSVAFPPPSAFFSADATATTVTTTAAPAANASWLIQTGGASTPSVRERFSQALSYIRDTQSDGDVLVQLWVPVNRDDGKLVLTTSGQPFTLDHRSDSLIRFREVSTKYQFPADVRSGESPGLPGRVFIGRLPEWSPDIRCFTSYEYARVTDAKYLDVHGTMGLPVFEKRSYSCLGVIELIMTKQKLNFTSELNTICSALQVGDLNLTAPESSEKYTANALGSLQAVNLRSTEVSSIPRKKFSTASYKDALPEILEVLRAACLTHKLPLAQTWVTCTQQGKRGSRHSDENYRYCISTIDEACFVNEAEMRGFHEACSEHHLLRGEGVAGKALTTNQPCFLPDIGSSTKLEYPLSHHAKIFRLKGAVAIRLRCTRTGIADFVLEFFLPTDCEALEEQKTVLDSLSGTMRSVCQTLRVVTDREMEGEAALEMNELNSFTPPEKDKDELSFGGNSADRRGASWTSLAGTSQQEPELAALRMHGTFSPGGQGPSLSGVQATAEGMCPTTLKRICRQHGITRWPSRKIKKVDHSLRKLQQIIDSVHGAETAFQLNTLYKDLTDTSISSDNNLSGSVTVPPTNQSNLTDFNKHQPHKSSSNMPSTSHSHSSCSHGSQSSPSCSVGATEHAQQGIIDLMKSENPVKDSSIQTMQTENTSLYEHFSVHEAPIDLLQDVTEKANGAHHSSRSMSSPNRKQNTDANMRVKATFGSEKVRFRLNPECNFQGLKHELAKRLSIVDTNPLVLKYLDDDSEWVLMTCDADLQECLHVYKLADIQTIKISVHLAVSPATRVTAGHTGLS

SEQ ID NO: 229 - protein, 869 aa, Zea mays
MCMDQQNRSSEGRVTCICMEEGGDPQLPSISAPRTTSEGAGGVDLDLLEQLLSGDNGWLEVVSRSPNSVAFPPLSAFFSADATATTVTTAAPAANASWWIQTGGASPSSVEERFSQALSYIRDTQSDGDVLVQLWVPVNRDDGKLVLTTSEQPFTLDHRSDSLLRFREVSTKYQFSADVKSGDSPGLPGRVFIGRLPEWSPDIRYFTSYEYPRVRDAQYLDVHGTMGLPVFEKGSYNCLGVIELIMTRQKINFTSELNTICSALQAVNLRSTEVSSIPRIKFSTASYKDALPEILEVLRAACLTHKLPLAQTWVTCAQQGKRGSRHSDENYRYCISTIDEACFVNEAEMRGFHEACSEHHLLRGEGVAGKAFTTNQPCFLPDIGSSTKLEYSLSHHAKIFKLKGAVAIRLRCTRTGTADFVLEFFLPTDCEALEEQKSVLDSLSGTMRSVCQTLRVVTDREMEDETVLEMNELNSFTPHGKDKVELSFGCNSADRRGEASWTSLAGTSQQESELAALRMHGMFSPGGQGPSLSGVQATAEGSKAKRRTKAEKTVSLQILRQYFAGSLKDAARSLGVCPTTLKRICRQHGITRWPSRKIKKVDHSLRKLQQIIDSVHGAETAFQLNTLYKDITNTSISSDNNLSGSVTVPPTNQSNLTDVNKHQPHKSSSNVPSTSHSHSSCSHSSESSPSCSGGATKHAQQGIIDQMKSENPVKDSSIQTLQTENTSLFEHFSVNETPIDLLQDVTEKANGGHHSSRSPSSPNPKQNTDANMRVKATFGSEKVRFRLNPECNFQELKHEIAKRLSIVDTNPLVLKYLDDDSEWVLMTCDADLQECLHVYKLAGIQTIKISVHLAVSPATRVTTGHTGLS

SEQ ID NO: 230 - protein, 851 aa, Zea mays
MEEGGDPQLPSISVARTTSEGAGAVDLDLLEQLLSGDNGWLEVVSRSPNSVAFPPPSAFFSADATATTVTTTAAPAANASWLIQTGGASTPSVRERFSQALSYIRDTQSDGDVLVQLWVPVNRDDGKLVLTTSGQPFTLDHRSDSLIRFREVSTKYQFPADVRSGESPGLPGRVFIGRLPEWSPDIRCFTSYEYARVTDAKYLDVHGTMGLPVFEKRSYSCLGVIELIMTKQKLNFTSELNTICSALQAVNLRSTEVSSIPRKKFSTASYKDALPEILEVLRAACLTHKLPLAQTWVTCTQQGKRGSRHSDENYRYCISTIDEACFVNEAEMRGFHEACSEHHLLRGEGVAGKALTTNQPCFLPDIGSSTKLEYPLSHHAKIFRLKGAVAIRLRCTRTGIADFVLEFFLPTDCEALEEQKTVLDSLSGTMRSVCQTLRVVTDREMEGEAALEMNELNSFTPPEKDKDELSFGGNSADRRGASWTSLAGTSQQEPELAALRMHGTFSPVGQGPSLSGVQATAEGSKTKRRTKAEKTVSLQVLRQYFAGSLKDAARSLGVCPTTLKRICRQHGITRWPSRKIKKVDHSLRKLQQIIDSVHGAETAFQLNTLYKDLTDTSISSDNNLSGSVTVPPTNQSNLTDFNKHQPHKSSSNMPSTSHSHSSCSHGSQSSPSCSVGATEHAQQGIIDLMKSENPVKDSSIQTMQTENTSLYEHFSVHEAPIDLLQDVTEKANGAHHSSRSLSSPNPKQNTDANMRVKATFGSEKVRFRLNPECNFQGLKHELAKRLSIVDTNPLVLKYLDDDSEWVLMTCDADLQECLHVYKLADIQTIKISVHLAVSPATRVTAGHTGLS

SEQ ID NO: 231 - protein, 984 aa, Zea mays
MQAQKEGALRGEDACDCTTQVRFHHQRLPCLSLAPHVAVSEIDQTEPPGQEQAAHLHSIHCFIGGRTASATRERPRSSSCHCASEAPQTHGGGGLLACGVMEDVAVGDLDLMEELFMAAPGFDFSDFSQPGAGGESPGVCFSPLFDICSTTTTATPPPPPPSGDDNRDQPTPPRRGWVFQPRLEVDATVKERLRRALERIASLSQTQPGELLAQVWVPTVIGDRQVLTTCGQPFWLDCRNERLANYRTVSMKYQFSADETARTDLGMPGRVFVGRVPEWTPDVRYFSTEEYPRVHHAQYFDIRGSVALPIFEPRSRVCLGVVELVMTTEKVNYNAEIQNICSALKEVDLRSSDVSSDSRAKVTDTSYRAIIPEIVDVLRTVCETHKLPLAQTWIPCICQAKRGSRHTDEKLKYCVSTLDEACYVRDLNVNGFHEACSEHHLFRGEGVVGRAFATNEPCFSEDITASSKIQYPLSHHAKLFSLRAAVAIRLRSISTGSLDYVLEFFLPVDCIEIEEQRAMLNSLSITIQQTCYTLRVVSLKELVDEGSIETSALTPPEYDKSMHENIDEVCSGIGVPARTASLETSEEVSSWIASLVCAQNKGVKEMDGDLPFGFSKQEDEGFSVTAGWHTSPVIEPEGSIFSGFKQHEEYKVKEVTCLRDPSSSNLEKTVEKRRTKMEKTVSLEELRKHFAGSLKEAAKNLGVCPTTLKRICRQHGINRWPSRKIKKVGHSLKKLQMVIDSVHGSEGTVQLSSLYENFTKTTWSERELQGDATYPLSEEKGPLEPSVPDRYCEGRFTSHTSGSNSLSPSCSQSSNSSHGCSSGSKSQQHVSAPQLAVKKEVFMEENQSSTLLKAASHAELQMLPEERLVTLPRSHSQVLLSEQKPVENITGMQMSKPDSLKIKAMYGEERCIFRLQPSWGFEKLKEEILKRFGIAREVYVDLKYLDDESEWVLLTCNADLLECIDVYKSSSTQTVRILVHSSDQ

SEQ ID NO: 232 - protein, 851 aa, Zea mays
MEEGGDPQLPSISVARTTSEGAGAVDLDLLEQLLSGDNGWLEVVSRSPNSVAFPPPSAFFSADATATTVTTTAAPAANASWLIQTGGASTPSVRERFSQALSYIRDTQSDGDVLVQLWVPVNRDDGKLVLTTSGQPFTLDHRSDSLIRFREVSTKYQFPADVRSGESPGLPGRVFIGRLPEWSPDIRCFTSYEYARVTDAKYLDVHGTMGLPVFEKRSYSCLGVIELIMTKQKLNFTSELNTICSALQAVNLRSTEVSSIPRKKFSTASYKDALPEILEVLRAACLNHKLPLAQTWVTCTQQGKRGSRHSDENYRYCISTIDEACFVNEAKMRGFHEACSEHHLLRGEGVAGKALTTNQPCFLPDIGSSTKLEYPLSHHAKIFKLKGAVAIRLRCTRTGIADFVLEFFLPTDCEALEEQKTVLDSLSGTMQSVCQTLRVVTEREMEDEAALEMNELNSFTPPGKDKDELSFGGNSADRREASWTSLAGTSQQEPDLAALRMHGTFSPGGQGPSLSGVQATAEGSKTKRRTKAEKTVSLQVLRQYFAGSLKDAARSLGVCPTTLKRICRQHGITRWPSRKIKKVDHSLRKLQQIIDSVHGAETAFQLNTLYKDLTDTSISSDNNLSGSVTVPPTNQSNLTDFNKHQPHKSSSNMPSTSHSHSSCSHGSQSSPSCSVGATEHAQQGIIDPMKSENPVKDSSIQTMQTENTSLYEHFSVHEAPIDLLQDVTEKANDAHHSSRSLSSPNPKQNTDANMRVKATFGSEKVRFRLNPECNFQGLKHELAKRLRIVDTNPLVLKYLDDDSEWVLMTCDADLQECLHVYKLADIQTIKISVHLAVSPATRVTAGHTGLS

SEQ ID NO: 233 - protein, 534 aa, Zea mays
MLHGGGSDRESYLHLHGRGRRPAASEHLRTHHVQRRGGVDLDLLEQLLSGDNGWLEVVSRSPNLVAFPLLSAFFSADATATTVTTAATAAPAANASWWIQTGGTSPSSVEERFSQAMSYIRDTEQPFTLDHRSDSLLRFREVSTKYQFSADVKSGDSPGLPGRVFIGRLPEWSPDIRYFTSYEYPRVRDAQYLDVHGTMGLPVFEKGSYNCLGVIELIMTRQKINFTSKLNTICSALQAVNLRSTEVSSIPRIKNYRYCISTIDEACFVNEAEMRGFHEACSEHHLLRGEGVAGKAFTTNQPCFLPDIGSSTKLEYPLSHHAKIFKLKGAVAILLRCTRTGTADFVLEFFLPTDCEALEEQKIVLDSLSGTMRSVCQTLRVVTDREMEDEAVLEMNELNSFTPHGKDQVELSFGDNSADRRGEASWTSLAGTSQQESELAALRMHGMFSPGGQGPSLSGVTAEGSKAKRRTKAEKTYFAGSLKDAARSLGGSKQEGCSCIVSLDTSYQLQARLEQQIDGKAHYLSTLAGMALKS

SEQ ID NO: 234 - protein, 854 aa, Zea mays
MEEGGDPQLPSISAPRTTSEGAGGVDLDLLEQLLSGDNGWLEVVSRSPNSVAFPPLSAFFSADATATTVTTAATAAPAANASWWIQTGGASPSSVEERFSQALSYIRDTQSDGDVLVQLWVPVNRDDGKLVLTTSEQPFTLDHRSDSLLRFREVSTKYQFSADVKSGDSPGLPGRVFIGRLPEWSPDIRYFTSYEYPRVRDAQYLDVHGTMGLPVFEKGSYNCLGVIELIMTRQKINFTSELNTICSALQAVNLRSTEVSSIPRIKFSTASYKDALPEILEVLRAACLTHKLPLAQTWVTCAQQGKRGSRHSDENYRYCISTIDEACFVNEAEMRGFHEACSEHHLLRGEGVAGKAFTTNQPCFLPDIGSSTKLEYPLSHHAKIFKLKGAVAIRLRCTRTGTADFVLEFFLPTDCEALEEQKSVLDSLSGTMRSVCQTLRVVTDREMEDETVLEMNELNSFTPHGKDKVELSFGCNSADRRGEASWTSLAGTSQQESELAALRMHGMFSPGGQGPSLSGVQATAEGSKAKRRTKAEKTVSLHILRQYFAGSLKDAARSLGVCPTTLKRICRQHGITRWPSRKIKKVDHSLRKLQQIIDSVHGAETAFQLNTLYKDITNTSISSDNNLSGSVTVPPTNQSNLTDVNKHQPHKSSSNVPSTSHSHSSCSHSSESSPSCSGGATKHAQQGIIDQMKSENPVKDSSIQTLQTENTSLFEHFSVNETPIDLLQDVTEKANGGHHSSRSPSSPNPKQNTDANMRVKATFGSEKVRFRLNPECNFQELKHEIAKRLSIVDTNPLVLKYLDDDSEWVLMTCDADLQECLHVYKLAGIQTIKISVHLAVSPATRVTTGHTGLS

SEQ ID NO: 235 - protein, 906 aa, Ziziphus jujuba
MDDSVLSPALVLGAPSDTAMDLDFMDELFLEGCWLETTDGSGFLNQSPPGSNALFDPLFVWPSSETNSELGTNPSKRSNQDERHKASFNEPVERGPLATESSPQTMIDVAGCSDGLEDQTFQVCEPGRRWWIGPKASPGPASSVVERLVGALALIKDVIKDKNSLVQIWVPVHREGRHVLTTNNLPCAVYPSCHKLARYRDISVNYEFSAEEDSEELVMGLPGRVFSRKVPEWTPDVRFFRNEEYPRVSHAQQNDVCGTLALPIFEKGSRNCLGVVEVVLTTQKIKYRSELESVCEALEAVDLRSSEILNRNVKVRNMYCQASLPEIQEVLRSACETHRLPLAQTWVPCIQQAKDGSRHSDDNYTWCVSTVDHACHVADLHFRAFHEACSEHHLLKGQGIVGEAFMTNKPCFSDDIASISKTKYPLSHHARMFGLRSAVAIRLRSIHADVADFVLELFLPVDCTDPEEQKKMLTSLSLIIQQFCRSLRVITDEELEEESEFPVSEVTVPSNSRPGTTASLTEVRQGGTAISLFPKEKPMEDSGEKLSKLGQLQKDSNNKTVEYAGDCYTIGEGSCSSLGVGKTSEKRRTKAEKTITLQVLRQYFAGSLKDAAKSIGVCSTTLKRICRQHGIKRWPSRKIKKVGHSLQKLQLVIDSVQGASGAFQIDSFYTNFPELASPNLSGSDPFSTSKRDHPKPTNMQPEGGMFSSQATASKSSSSCSQSSSSSQSCSSRSQQQPRMSNVAGNEDLMVGENFGDGMLKRVRSEAELHASTVDVSKPLQRSRSHKSLSDHHQKENVPTLPRDNSRGSQVVGDFQRVKVTYGDEKTRFRMHNSWGVKELVQEISRRFDIEDMDQFDIKYLDDDSEWVLLTCDADLEECIEIYRSSSESNTIKLSLHVSRHHLRGPS

SEQ ID NO: 236 - protein, 939 aa, Ziziphus jujuba
MEYYGAMLPNSTYGNFPNTTSTTTTNAEEDFMDELLFEGCWLESSSGFNFMQPFSSNPHPLVVDPWHYLPSFESNSALSNMNPHHQIYQQDHTADQGSLTENHHENYNCFVIESSSNSRSSGNGNGGHIGGSRLWIGPRAYPNPSSSVKERLMLAIGHLKECTKHMDVLIQIWVPVRKGGKQMLTTYDHPYYLNTNCKSLENYQLLTEEDSTESVRLPHRTFLGKLPEWKPDVRFFQSYEYPRVNYGQQHDVRGSLAVPIFERGSGTCLGVIEIVMTTQMVNYRPEEYVFQALEAVDLRSSQNFIPPNIEACDELYQAALSEIVEVLTSVCKTNRLPLALTWAPCVQQGKGGCRHSDVNYARCVSTVDSACLVIDLEILGFHEACSKHHLFRGQGIVGTAFSTSKTCFATDITAFSKTEYPLSHYARMFGVHAAVAIPLRTVYTGSSDFVLEFFLPQDCHDPEEQKQMLNSLPIVIRQACRSLYVVDDKEPEEVMQPIRETIVLSDLRLGKEESLNLGPPSEETSEKESSWIAHMEAQQQGRCLSVLLDYQMEEPKEELKGTTHWDSNQGGLPNGQVFTDFRQLKQSSGHKVSVEGGGNSYSFGGHCSSGGRKAGRRRHTKTEKAISLQVLQQYFAGSLKDAAKSIGVCPTTLKRICRQHGITRWPSRKIKKVGHSLRKLQLVIDSVPGAEGAIQIGSFYPTFQELSFPKFQESDPFTSMKSSNQSKQLNSQSESGLFSQGGTTKSPSALCSQTSGLSVCAAEAKQHITNINGISCTDALMAKDPVGMLKRDCSDGKLLACNLEETKILPRSQSYKALSKNQTLESLHPMLGSSGWNFCDGGALRVEAYFGDEKIRFTLQSNHSFGDLQLEIARRFNLDDISTIDIKYLDDDHEWVLLTCNADLEECMEIYKSSQSHTLQLSLQRAPFPNQGSSFGSSS

SEQ ID NO: 237 - protein, 894 aa, Arabidopsis thaliana
MENPSASRDNKGFCFPDIPVEEMDGWVKNLISEEDMFSSSSTSELMNFESFASWCNSPSAADILFTQYGLSTSQSIIPFGGLEGSYACEKRPLDCTSVPRSLSHSLDEKMLKALSLFMEFSGEGILAQFWTPIKTGDQYMLSTCDQAYLLDSRLSGYREASRRFTFSAEANQCSYPGLPGRVFISGVPEWTSNVMYYKTAEYLRMKHALDNEVRGSIAIPVLEASGSSCCAVLELVTCREKPNFDVEMNSVCRALQAVNLQTSTIPRRQYLSSNQKEALAEIRDVLRAVCYAHRLPLALAWIPCSYSKGANDELVKVYGKNSKECSLLCIEETSCYVNDMEMEGFVNACLEHYLREGQGIVGKALISNKPSFSSDVKTFDICEYPLVQHARKFGLNAAVATKLRSTFTGDNDYILEFFLPVSMKGSSEQQLLLDSLSGTMQRLCRTLKTVSDAESIDGTEFGSRSVEMTNLPQATVSVGSFHTTFLDTDVNSTRSTFSNISSNKRNEMAGSQGTLQQEISGARRLEKKKSSTEKNVSLNVLQQYFSGSLKDAAKSLGVCPTTLKRICRQHGIMRWPSRKINKVNRSLRKIQTVLDSVQGVEGGLKFDSVTGEFVAVGPFIQEFGTQKSLSSHDEDALARSQGDMDEDVSVEPLEVKSHDGGGVKLEEDVETNHQAGPGSLKKPWTWISKQSGLIYSDDTDIGKRSEEVNKDKEDLCVRRCLSSVALAGDGMNTRIERGNGTVEPNHSISSSMSDSSNSSGAVLLGSSSASLEQNWNQIRTHNNSGESGSSSTLTVKATYREDTVRFKLDPYVVGCSQLYREVAKRFKLQEGAFQLKYLDDEEEWVMLVTDSDLHECFEILNGMRKHTVKFLVRDIPNTAMGSSAGSNGYLGTGT

SEQ ID NO: 238 - protein, 947 aa, Arabidopsis thaliana
MENPFASREKGFGNYSDFPTEQMDGLSSNFGSGVRNLISDDMFNPSSELMNFDSLAAWCNSPSATDILFAQYGLSNSQPMPFGAFTSFHVADPKATSLTRSFYDLESSYYGEERSSAQEMNSQFHRSSDSDELSGKRRKVVNQKIGFPNVLNCTIPRSLSHSLDEKMLKALSLFMESSGSGEGILAQVWTPIKTGDQYLLSTCDQAYLLDPRFSQYREVSRRFTFAAEANQCSFPGLPGRVFISGVPEWTSNVMYYKTDEYLRMKHAIDNEVRGSIAIPILEASGTSCCAVMELVTSKEKPNFDMEMDSVCRALQAVNLRTAAIPRPQYLSSSQRDALAEIQDVLRTVCHAHKLPLALAWIPCRKDQSIRVSGQKSGENCILCIEETACYVNDMEMEGFVHACLEHCLREKEGIVGKAFISNQPFFSSDVKAYDISEYPIVQHARKYGLNAAVAIKLRSTYTGEDDYILELFLPVSMKGSLEQQLLLDSLSGTMQRICRTLRTVSEVGSTKKEGTKPGFRSSDMSNFPQTTSSENFQTISLDSEFNSTRSMFSGMSSDKENSITVSQGTLEQDVSKARTPEKKKSTTEKNVSLSALQQHFSGSLKDAAKSLGGETSAYFQAWVYFFCPTTLKRICRQHGIMRWPSRKINKVNRSLRKIQTVLDSVQGVEGGLKFDSATGEFIAVRPFIQEIDTQKGLSSLDNDAHARRSQEDMPDDTSFKLQEAKSVDNAIKLEEDTTMNQARPGSFMEVNASGQPWAWMAKESGLNGSEGIKSVCNLSSVEISDGMDPTIRCSGSIVEPNQSMSCSISDSSNGSGAVLRGSSSTSMEDWNQMRTHNSNSSESGSTTLIVKASYREDTVRFKFEPSVGCPQLYKEVGKRFKLQDGSFQLKYLDDEEEWVMLVTDSDLQECLEILHGMGKHSVKFLVRDLSAPLGSSGGSNGYLGTGL

SEQ ID NO: 239 - protein, 870 aa, Arachis duranensis
MEPYPYSPKRSGASYWGSCRVQLEGSTSLDGDMSNSISDDMACSFSGLMNFDPYAGLYNSPSITDQVFNNGLPSSYPSTPGFNLEENNSSQFFRTEMNGYFNTKQGSPGYGEKIAFQQMDTLLGFFDGTDDTHSLSSMQKINGSSQHLDAIGSYIMSKPASLSLDERMLKALSVFKESAGGGILAQVWVPIKDGDQFFLTTSEQPYLLDQILAGYREVSRTYTFSTEGKPGSLPGLPGRVFMSKTPEWTSNIGYYNKNEYLRMDDAINHEVRGSIGLPISDLHSELPCCAVLELVTTNEKPDFEKEMDIVCHALQNVDLTANMPPRLLPQCLSNSKRAALTAIVDVLRSVCHAHRLPIALTWIPCCVAEDAEGKDTKIHIKEGHSSPREKNILCVEESACYVTDKAMEGFVHACIEHHLQEGKGIAGRAHQSNHPFFCPDVKAYNISEYPLVHHARKYNLNAAVAIRLRSTYTNDDDYILEFFLPVNMKGSSEQQLLLDNLSGTMQKVCRNLRTVSDEELSRMKGSHVGFKNKNVPRIFPMSRRNSQIPLTNSNHDSVRKMSIKASNQGNNGIESSHNQERNGSRRMVETKRPAEKKVSLSVLQQHFSGTLKDAARSIGVCPTTLKRICRKQGISRWPSRKIKKVNRSLKKIQTVLDTVEGLEGGLKFDPCLGALVSREGESIIQEIDAHDTLLHPENVTAKEKWVLNKGGSREDKSKHSSILVNRDDDGAVEHNHPSSSGFTNSSNDSGSNQRQNLKGKSTFADKTGLKLQAKATYGEDTVRFKFDPSWGCLKLYEEVATRFKLQNGSFQLKYLDNEQELVRLLDDSDLQECMEILDEVGKSCVRFVVRDIPCNLSSPSCSSCYLGCDS

SEQ ID NO: 240 - skipped

SEQ ID NO: 241 - protein, 891 aa, Arachis duranensis
MEDQFFSEGEGIGYWTPPGAQFDGPSMIDNGIKNLVSEEMLDNLPDLMNFDNLAGWGNIPSVTDHNLDNEISSLASMQYSPPDAFSLVEQDNDPYFMTKDCGNYNATETSLGFDEKAVLQQLETQLGLSEDANDMNNINGSLRELSAADMGNCLVPRPFAWSLDERMLRAMDLFKESVGDGILTQVWAPMKHGNDFILSTSEQPYLLDHMLAGYRDVSRQFTFSAEDKPGSFPGLPGRVFNSQIPEWTSNVGYYNKSEYLRVEHAINHEVRGSIAVPIIDTLAEPPCCAILELVTTKEKTDFDRELEIVSSALQLVNLRTTTPPRLMSQCLSNNKRAALAEIIDVLRAVCHAHRLPLALTWIPCYYSEGIGDEASRIRIKDGGRIPGEKTVLCIEESACYINDIVVGGFVHACVEHYLEEGQGAAGKALQSNRPFFCPDVKAYNISEYPLVHHARKYKLNAAVAVRLRSIHTNDDDYIIEFFLPVNMNGSEEQQLLLDNLSDTVQRMCQSLRIVSDAELHGIEGSQVQFSKEEGSHMAPDGDHDNHDSVQPMSMTNNETEAAHNQAMEGSRKQIEKKRSPVKKNVSLSVLQQYFSCSLKDAAKSLGVCPTTLKRICRQHGIARWPSRKINKVNRSLKKIRTVLDSVQGVEGGLKFDPYKGGFMSVGSSNQEINAHKSSLFRKKCSVKYPDPASGSKDSKPIAMGDGGLRQEPFPVSILESFWCDIAYHSPNSLVADEMETYLNGADKLGEHYNPTTSSMTDSSNGSCSILRSSSSASGKFENRKHLKAKSPCVDSGSKIIVKAAYGEDLIRFKFDPAAGCLQLYEEVAARFKLQIGSFQLKYLDDEEEWVRMANDSDLEDCIEMLDDLDTRAVKLLVHDMPSGLSSLGSNG

SEQ ID NO: 242 - protein, 890 aa, Arachis duranensis
MEDQFFSEGEGIGYWTPPGAQFDGPSMIDNGIKNLVSEEMLDNLPDLMNFDNLAGWGNIPSVTDHNLDNEISSLASMQYSPPDAFSLVEQDNDPYFMTKDCGNYNATETSLGFDEKAVLQQLETQLGLSEDANDMNNINGSLRELSAADMGNCLVPRPFAWSLDERMLRAMDLFKESVGDGILTQVWAPMKHGNDFILSTSEQPYLLDHMLAGYRDVSRQFTFSAEDKPGSFPGLPGRVFNSQIPEWTSNVGYYNKSEYLRVEHAINHEVRGSIAVPIIDTLAEPPCCAILELVTTKEKTDFDRELEIVSSALQLVNLRTTTPPRLMSQCLSNNKRAALAEIIDVLRAVCHAHRLPLALTWIPCYYSEGIGDEASRIRIKDGGRIPGEKTVLCIEESACYINDIVVGGFVHACVEHYLEEGQGAAGKALQSNRPFFCPDVKAYNISEYPLVHHARKYKLNAAVAVRLRSIHTNDDDYIIEFFLPVNMNGSEEQQLLLDNLSDTVQRMCQSLRIVSDAELHGIEGSQVQFSKEEGSHMAPDGDHDNHDSVQPMSMTNNETEAAHNQAMEGSRKQIEKKRSPVKKNVSLSVLQQYFSCSLKDAAKSLVCPTTLKRICRQHGIARWPSRKINKVNRSLKKIRTVLDSVQGVEGGLKFDPYKGGFMSVGSSNQEINAHKSSLFRKKCSVKYPDPASGSKDSKPIAMGDGGLRQEPFPVSILESFWCDIAYHSPNSLVADEMETYLNGADKLGEHYNPTTSSMTDSSNGSCSILRSSSSASGKFENRKHLKAKSPCVDSGSKIIVKAAYGEDLIRFKFDPAAGCLQLYEEVAARFKLQIGSFQLKYLDDEEEWVRMANDSDLEDCIEMLDDLDTRAVKLLVHDMPSGLSSLGSNG

SEQ ID NO: 243 - protein, 888 aa, Arachis duranensis
MEDQFFSEGEGIGYWTPPGAQFDGPSMIDNGIKNLVSEEMLDNLPDLMNFDNLAGWGNIPSVTDHNLDNEISSLASMQYSPPDAFSLVEQDNDPYFMTKDCGNYNATETSLGFDEKAVLQQLETQLGLSEDANDMNNINGSLRELSAADMGNCLVPRPFAWSLDERMLRAMDLFKESVGDGILTQVWAPMKHGNDFILSTSEQPYLLDHMLAGYRDVSRQFTFSAEDKPGSFPGLPGRVFNSQIPEWTSNVGYYNKSEYLRVEHAINHEVRGSIAVPIIDTLAEPPCCAILELVTTKEKTDFDRELEIVSSALQLVNLRTTTPPRLMSQCLSNNKRAALTEIIDVLRAVCRAHSLPLALTWIPCYYSEGIGDEASRIRTKEGRKLPGEKTVLCIEESACYMNDIVVGGFVRACVEHYLEEGQGAAGKALQSNRPFFCPDVKAYNISEYPLVHHARKYKLNAAVAIRLRSTHTNDDDYIIEFFLPLNMNRCQEQQVLLENLSRTMQRMCQTLRKVSDAELYGIEGSQVQFSKEEGSHMAPDGNHDSVQPMSMTNNETEAAHNQAMEGSRKQIEKKRSPVKKNVSLSVLQQYFSCSLKDAAKSLGVCPTTLKRICRQHGIARWPSRKINKVNRSLKKIRTVLDSVQGVEGGLKFDPYKGGFMSVGSSNQEINAHKSSLFRKKCSVKYPDPASGSKDSKPIAMGDGGLRQEPFPVSILESFWCDIAYHSPNSLVADEMETYLNGADKLGEHYNPTTSSMTDSSNGSCSILRSSSSASGKFENRKHLKAKSPCVDSGSKIIVKAAYGEDLIRFKFDPAAGCLQLYEEVAARFKLQIGSFQLKYLDDEEEWVRMANDSDLEDCIEMLDDLDTRAVKLLVHDMPSGLSSLGSNG

SEQ ID NO: 244 - protein, 888 aa, Arachis duranensis
MEDQFFSEGEGIGYWTPPGAQFDGPSMIDNGIKNLVSEEMLDNLPDLMNFDNLAGWGNIPSVTDHNLDNEISSLASMQYSPPDAFSLVEQDNDPYFMTKDCGNYNATETSLGFDEKAVLQQLETQLGLSEDANDMNNINGSLRELSAADMGNCLVPRPFAWSLDERMLRAMDLFKESVGDGILTQVWAPMKHGNDFILSTSEQPYLLDHMLAGYRDVSRQFTFSAEDKPGSFPGLPGRVFNSQIPEWTSNVGYYNKSEYLRVEHAINHEVRGSIAVPIIDTLAEPPCCAILELVTTKEKTDFDRELEIVSSALQLVNLRTTTPPRLMSQCLSNNKRAALAEIIDVLRAVCHAHRLPLALTWIPCYYSEGIGDEASRIRIKDGGRIPGEKTVLCIEESACYINDIVVGGFVHACVEHYLEEGQGAAGKALQSNRPFFCPDVKAYNISEYPLVHHARKYKLNAAVAVRLRSIHTNDDDYIIEFFLPVNMNGSEEQQLLLDNLSDTVQRMCQSLRIVSDAELHGIEGSQVQFSKEEGSHMAPDGDHDLVQPMSMTNNETEAAHNQAMEGSRKQIEKKRSPVKKNVSLSVLQQYFSCSLKDAAKSLGVCPTTLKRICRQHGIARWPSRKINKVNRSLKKIRTVLDSVQGVEGGLKFDPYKGGFMSVGSSNQEINAHKSSLFRKKCSVKYPDPASGSKDSKPIAMGDGGLRQEPFPVSILESFWCDIAYHSPNSLVADEMETYLNGADKLGEHYNPTTSSMTDSSNGSCSILRSSSSASGKFENRKHLKAKSPCVDSGSKIIVKAAYGEDLIRFKFDPAAGCLQLYEEVAARFKLQIGSFQLKYLDDEEEWVRMANDSDLEDCIEMLDDLDTRAVKLLVHDMPSGLSSLGSNG

SEQ ID NO: 245 - protein, 888 aa, Arachis duranensis
MEDQFFSEGEGIGYWTPPGAQFDGPSMIDNGIKNLVSEEMLDNLPDLMNFDNLAGWGNIPSVTDHNLDNEISSLASMQYSPPDAFSLVEQDNDPYFMTKDCGNYNATETSLGFDEKAVLQQLETQLGLSEDANDMNNINGSLRELSAADMGNCLVPRPFAWSLDERMLRAMDLFKESVGDGILTQVWAPMKHGNDFILSTSEQPYLLDHMLAGYRDVSRQFTFSAEDKPGSFPGLPGRVFNSQIPEWTSNVGYYNKSEYLRVEHAINHEVRGSIAVPIIDTLAEPPCCAILELVTTKEKTDFDRELEIVSSALQLVNLRTTTPPRLMSQCLSNNKRAALAEIIDVLRAVCHAHRLPLALTWIPCYYSEGIGDEASRIRIKDGGRIPGEKTVLCIEESACYINDIVVGGFVHACVEHYLEEGQGAAGKALQSNRPFFCPDVKAYNISEYPLVHHARKYKLNAAVAVRLRSIHTNDDDYIIEFFLPVNMNGSEEQQLLLDNLSDTVQRMCQSLRIVSDAELHGIEGSQVQFSKEEGSHMAPDGDHDLVQPMSMTNNETEAAHNQAMDGSRKQTEKKKSSVEKNFSSSVLQQYFSGSLKDAAKSLGVCPTTLKRICRQHGIARWPSRKINKVNRSLKKIRTVLDSVQGVEGGLKFDPYKGGFMSVGSSNQEINAHKSSLFRKKCSVKYPDPASGSKDSKPIAMGDGGLRQEPFPVSILESFWCDIAYHSPNSLVADEMETYLNGADKLGEHYNPTTSSMTDSSNGSCSILRSSSSASGKFENRKHLKAKSPCVDSGSKIIVKAAYGEDLIRFKFDPAAGCLQLYEEVAARFKLQIGSFQLKYLDDEEEWVRMANDSDLEDCIEMLDDLDTRAVKLLVHDMPSGLSSLGSNG

SEQ ID NO: 246 - protein, 860 aa, Arachis duranensis
MEDQFFSEGEGIGYWTPPGAQFDGPSMIDNGIKNLVSEEMLDNLPDLMNFDNLAGWVEQDNDPYFMTKDCGNYNATETSLGFDEKAVLQQLETQLGLSEDANDMNNINGSLRELSAADMGNCLVPRPFAWSLDERMLRAMDLFKESVGDGILTQVWAPMKHGNDFILSTSEQPYLLDHMLAGYRDVSRQFTFSAEDKPGSFPGLPGRVFNSQIPEWTSNVGYYNKSEYLRVEHAINHEVRGSIAVPIIDTLAEPPCCAILELVTTKEKTDFDRELEIVSSALQLVNLRTTTPPRLMSQCLSNNKRAALAEIIDVLRAVCHAHRLPLALTWIPCYYSEGIGDEASRIRIKDGGRIPGEKTVLCIEESACYINDIVVGGFVHACVEHYLEEGQGAAGKALQSNRPFFCPDVKAYNISEYPLVHHARKYKLNAAVAVRLRSIHTNDDDYIIEFFLPVNMNGSEEQQLLLDNLSDTVQRMCQSLRIVSDAELHGIEGSQVQFSKEEGSHMAPDGDHDNHDSVQPMSMTNNETEAAHNQAMEGSRKQIEKKRSPVKKNVSLSVLQQYFSCSLKDAAKSLGVCPTTLKRICRQHGIARWPSRKINKVNRSLKKIRTVLDSVQGVEGGLKFDPYKGGFMSVGSSNQEINAHKSSLFRKKCSVKYPDPASGSKDSKPIAMGDGGLRQEPFPVSILESFWCDIAYHSPNSLVADEMETYLNGADKLGEHYNPTTSSMTDSSNGSCSILRSSSSASGKFENRKHLKAKSPCVDSGSKIIVKAAYGEDLIRFKFDPAAGCLQLYEEVAARFKLQIGSFQLKYLDDEEEWVRMANDSDLEDCIEMLDDLDTRAVKLLVHDMPSGLSSLGSNG

SEQ ID NO: 247 - protein, 795 aa, Arachis duranensis
MTKDCGNYNATETSLGFDEKAVLQQLETQLGLSEDANDMNNINGSLRELSAADMGNCLVPRPFAWSLDERMLRAMDLFKESVGDGILTQVWAPMKHGNDFILSTSEQPYLLDHMLAGYRDVSRQFTFSAEDKPGSFPGLPGRVFNSQIPEWTSNVGYYNKSEYLRVEHAINHEVRGSIAVPIIDTLAEPPCCAILELVTTKEKTDFDRELEIVSSALQLVNLRTTTPPRLMSQCLSNNKRAALAEIIDVLRAVCHAHRLPLALTWIPCYYSEGIGDEASRIRIKDGGRIPGEKTVLCIEESACYINDIVVGGFVHACVEHYLEEGQGAAGKALQSNRPFFCPDVKAYNISEYPLVHHARKYKLNAAVAVRLRSIHTNDDDYIIEFFLPVNMNGSEEQQLLLDNLSDTVQRMCQSLRIVSDAELHGIEGSQVQFSKEEGSHMAPDGDHDNHDSVQPMSMTNNETEAAHNQAMEGSRKQIEKKRSPVKKNVSLSVLQQYFSCSLKDAAKSLGVCPTTLKRICRQHGIARWPSRKINKVNRSLKKIRTVLDSVQGVEGGLKFDPYKGGFMSVGSSNQEINAHKSSLFRKKCSVKYPDPASGSKDSKPIAMGDGGLRQEPFPVSILESFWCDIAYHSPNSLVADEMETYLNGADKLGEHYNPTTSSMTDSSNGSCSILRSSSSASGKFENRKHLKAKSPCVDSGSKIIVKAAYGEDLIRFKFDPAAGCLQLYEEVAARFKLQIGSFQLKYLDDEEEWVRMANDSDLEDCIEMLDDLDTRAVKLLVHDMPSGLSSLGSNG

SEQ ID NO: 248 - protein, 772 aa, Arachis duranensis
MEDQFFSEGEGIGYWTPPGAQFDGPSMIDNGIKNLVSEEMLDNLPDLMNFDNLAGWGNIPSVTDHNLDNEISSLASMQYSPPDAFSLVEQDNDPYFMTKDCGNYNATETSLGFDEKAVLQQLETQLGLSEDANDMNNINGSLRELSAADMGNCLVPRPFAWSLDERMLRAMDLFKESVGDGILTQVWAPMKHGNDFILSTSEQPYLLDHMLAGYRDVSRQFTFSAEDKPGSFPGLPGRVFNSQIPEWTSNVGYYNKSEYLRVEHAINHEVRGSIAVPIIDTLAEPPCCAILELVTTKEKTDFDRELEIVSSALQLVNLRTTTPPRLMSQCLSNNKRAALAEIIDVLRAVCHAHRLPLALTWIPCYYSEGIGDEASRIRIKDGGRIPGEKTVLCIEESACYINDIVVGGFVHACVEHYLEEGQGAAGKALQSNRPFFCPDVKAYNISEYPLVHHARKYKLNAAVAVRLRSIHTNDDDYIIEFFLPVNMNGSEEQQLLLDNLSDTVQRMCQSLRIVSDAELHGIEGSQVQFSKEEGSHMAPDGDHDNHDSVQPMSMTNNETEAAHNQAMEGSRKQIEKKRSPVKKNVSLSVLQQYFSCSLKDAAKSLGVCPTTLKRICRQHGIARWPSRKINKVNRSLKKIRTVLDSVQGVEGGLKFDPYKGGFMSVGSSNQEINAHKSSLFRKKCSVKYPDPASGSKDSKPIAMGDGGLRQEPFPVSILESFWCDIAYHSPNSLVADEMETYLNGADKLGEHYNPTTSSMTDSSNGNLRIGNI

SEQ ID NO: 249 - skipped

SEQ ID NO: 250 - protein, 870 aa, Arachis hypogaea
MEPYPYSPKRSGASYWGSCRVQLEGSTSLDGDMSNSISDDMACSFSGLMNFDPYAGLYNSPSITDQVFNNGLPSSYPSTPGFTLEENNSSQFFRTEMNGYFNTKQGSPGYGEKIAFQQMDTLLGFFDGTDDTHSLSSMQKINGSSQHLDAIGSYIMSKPASLSLDERMLKALSVFKESAGGGILAQVWVPIKDGDQFFLTTSEQPYLLDQILAGYREVSRTYTFSTEGKPGSLPGLPGRVFMSKTPEWTSNIGYYNKNEYLRMDDAINHEVRGSIGLPISDLHSELPCCAVLELVTTNEKPDFEKEMDIVCHALQNVDLTANMPPRLLPQCLSNSKRAALTAIVDVLRSVCHAHRLPIALTWIPCCVAEDAEGKDTKIHIKEGHSSPREKNILCVEESACYVTDKAMEGFVHACIEHHLQEGKGIAGRAHQSNHPFFCPDVKAYNISEYPLVHHARKYNLNAAVAIRLRSTYTNDDDYILEFFLPVNMKGSSEQQLLLDNLSGTMQKVCRNLRTVSDEELSRMKGSHVGFKNKNVPRIFPMSRRNSQIPLTNSNHDSVRKMSIKASNQGNNGIESSHNQERNGSRRMVETKRPAEKKVSLSVLQQHFSGTLKDAARSIGVCPTTLKRICRKQGISRWPSRKIKKVNRSLKKIQTVLDTVEGLEGGLKFDPCIGALVSREGESIIQEIDAHDTLLHPENVTAKEKWVLNKGGSREDKSKHSSILVNRDDDGAVEHNHPSSSGFTNSSNDSGSNQRQNLKGKSTFADKTGLKLQAKATYGEDTVRFKFDPSWGCLKLYEEVATRFKLQNGSFQLKYLDNEQELVRLLDDSDLQECMEILDEVGKSCVRFVVRDIPCNLSSSSCSSCYLGCDS

SEQ ID NO: 251 - protein, 878 aa, Arachis hypogaea
MEDKFFSEGEGIGYWTPPGAQFDGPSMIDNGIKNLVSEEMLDNLPDLMNFDNLAGWGNIPSVTDHNLDNGISSLASMPYSPPDAFSLVEQDNDPYFMTKDCGNYNAIETSLGFDEKAVLQQLETQLGLSEDANDMNNINESLQELSAADMGNCLVPRPFAWSLNERMLRAMDLFKELVGDGILTQVWAPMRHGNDFILSTSEQPYLLDHMLAGYRDVSREFTFSAEDKPGSFPGLPGRVFISQIPEWTSNVGYYNKSEFLRVEHAIHHEVRGSIAVPIIDTLAEPPCCAVLELVTTKEKPDFDKELEIVSSALQLVNLRTTTPPRIMSQCLSNNKRAALTEIIDVLRALCHAYSLPLALTWIPCCYTEGVGDEASRIRIKDGGRIPGEKTVLCIEESACYINDIVVGGFVHACVEHYLEEGQGVAGKALQSNRPFFYSDVKAYNISAYPLVHHARKYKLNAAVAVRLRSIHTNDDDYIIEFFLPVNMNGSEEQQLLLNNLSDTMQRMCQSLRTVSDAELYGIEGSQVQFSKEEGSHMAPDGDHDSVQPMSLTNNETEAAHNQAMDGSRKQIEKKKSPAEKNISLSVLQQYFSGSLKDAAKSLGVCPTTLKKICRQHGISRWPSRKINKVNRSLKKIQTVLDSVKGVEGGLKFDPYKGGFMSGGSSNQEINAHKSSLFRKKSSVKYPDPAAGSKDSKPIAMDDGGLRQEPFPVSILESSWCDIAYHSPNTLVADEMADKLGEHHNPTTSSMSDSSNGSGSILRGSRKFENRKHLKAKSPCVDNGSKLVVKAAYGEDMIRFKFDPAAGCLQLYEEVATRFKLQIGSFQLKYLDDDEEWVRMVNDSDLKECMEILDDHGTRAVKFLVLDIPSGLSSRGSNT

SEQ ID NO: 252 - protein, 847 aa, Arachis hypogaea
MEDKFFSEGEGIGYWTPPGAQFDGPSMIDNGIKNLVSEEMLDNLPDLMNFDNLAGWVEQDNDPYFMTKDCGNYNAIETSLGFDEKAVLQQLETQLGLSEDANDMNNINESLQELSAADMGNCLVPRPFAWSLNERMLRAMDLFKELVGDGILTQVWAPMRHGNDFILSTSEQPYLLDHMLAGYRDVSREFTFSAEDKPGSFPGLPGRVFISQIPEWTSNVGYYNKSEFLRVEHAIHHEVRGSIAVPIIDTLAEPPCCAVLELVTTKEKPDFDKELEIVSSALQLVNLRTTTPPRIMSQCLSNNKRAALTEIIDVLRALCHAYSLPLALTWIPCCYTEGVGDEASRIRIKDGGRIPGEKTVLCIEESACYINDIVVGGFVHACVEHYLEEGQGVAGKALQSNRPFFYSDVKAYNISAYPLVHHARKYKLNAAVAVRLRSIHTNDDDYIIEFFLPVNMNGSEEQQLLLNNLSDTMQRMCQSLRTVSDAELYGIEGSQVQFSKEEGSHMAPDGDHDSVQPMSLTNNETEAAHNQAMDGSRKQIEKKKSPAEKNISLSVLQQYFSGSLKDAAKSLGVCPTTLKKICRQHGISRWPSRKINKVNRSLKKIQTVLDSVKGVEGGLKFDPYKGGFMSGGSSNQEINAHKSSLFRKKSSVKYPDPAAGSKDSKPIAMDDGGLRQEPFPVSILESSWCDIAYHSPNTLVADEMADKLGEHHNPTTSSMSDSSNGSGSILRGSRKFENRKHLKAKSPCVDNGSKLVVKAAYGEDMIRFKFDPAAGCLQLYEEVATRFKLQIGSFQLKYLDDDEEWVRMVNDSDLKECMEILDDHGTRAVKFLVLDIPSGLSSRGSNT

SEQ ID NO: 253 - protein, 782 aa, Arachis hypogaea
MTKDCGNYNAIETSLGFDEKAVLQQLETQLGLSEDANDMNNINESLQELSAADMGNCLVPRPFAWSLNERMLRAMDLFKELVGDGILTQVWAPMRHGNDFILSTSEQPYLLDHMLAGYRDVSREFTFSAEDKPGSFPGLPGRVFISQIPEWTSNVGYYNKSEFLRVEHAIHHEVRGSIAVPIIDTLAEPPCCAVLELVTTKEKPDFDKELEIVSSALQLVNLRTTTPPRIMSQCLSNNKRAALTEIIDVLRALCHAYSLPLALTWIPCCYTEGVGDEASRIRIKDGGRIPGEKTVLCIEESACYINDIVVGGFVHACVEHYLEEGQGVAGKALQSNRPFFYSDVKAYNISAYPLVHHARKYKLNAAVAVRLRSIHTNDDDYIIEFFLPVNMNGSEEQQLLLNNLSDTMQRMCQSLRTVSDAELYGIEGSQVQFSKEEGSHMAPDGDHDSVQPMSLTNNETEAAHNQAMDGSRKQIEKKKSPAEKNISLSVLQQYFSGSLKDAAKSLGVCPTTLKKICRQHGISRWPSRKINKVNRSLKKIQTVLDSVKGVEGGLKFDPYKGGFMSGGSSNQEINAHKSSLFRKKSSVKYPDPAAGSKDSKPIAMDDGGLRQEPFPVSILESSWCDIAYHSPNTLVADEMADKLGEHHNPTTSSMSDSSNGSGSILRGSRKFENRKHLKAKSPCVDNGSKLVVKAAYGEDMIRFKFDPAAGCLQLYEEVATRFKLQIGSFQLKYLDDDEEWVRMVNDSDLKECMEILDDHGTRAVKFLVLDIPSGLSSRGSNT

SEQ ID NO: 254 - protein, 726 aa, Arachis hypogaea
MEDQFFSEGEGIGCWTPPGVQFDGPSMIDNGIKNLVSEEMLDNLPDLMNFDNLAGWGNIPSVTDHNLDNGISSLASMPYSPHDAFSLVEQANDPYFMTKDCGNYNAIETSLGFDEKVVLQQLETQLGLSEDANDMNNINGSLQELSAADMGNCLVPRPFAWSLDEKILRAMNLFKESVGDGILTQVWAPMKHGNDFILSTSEQPYLLDHMLAGYRDVSREFTFSAEDKPGSFPGLPGRVFISQIPEWTSNVGYYNKSEYLRVEHAINHDVRGSIAVPIIDTLAEPPCCAVLELVTTKEKPDFDKELEIVSSALQLVNLRTTTPPRLMSQCLSNNKRAALTGIIDVLRAVCHAHSLPLALTWIPCYHSEGIGDEASRIRIKDGVKIPGEKTVLCIEESASYINDIVVGGFVHACVEHYLEEGQGVAGKALQSNRPFFYSDVKAYNISEYPLVHHARKYKLNAAVAVRLRSTHTNDDDYIIEFFLPVNMNGSQEQQLLLNNLSDTMQRMCQSLRTVSDAELYGIEGSQVQFSKEEGSSFCSMSRGNSHMAPDGDHDSVQPMSLTNNETEAAHNQAMDGSRKQIEKKKSPVEKNVSLSVLQQYFSGSLKDAAKSLGVCPTTLKRICRQHGIARWPSRKINKVNRSLKKIQTVLDSVQGVEGGLKFDPYKGGFMPGGSSNQEINAHKSSLFRKKCSGKYPDPASKDAVTVSPASGGKGENLVSAFRHAYI

SEQ ID NO: 255 - protein, 899 aa, Arachis hypogaea
MEDQFFSEGEGIGYWTPPGAQFDGPSMIDNGIKNLVSEEMLDNLPDLMNFDNLAGWGNIPSVTDHNLDNGISSLASMPYSPPDAFSLVEQANDPYFMTKDCGNYNAIETSLGFDEKAVLQQLETQLGLSEDANDMNNINGSLQELSAADMGNCLVPRPFAWSLDEKMLRAMSLFKESVGDGILTQVWAPMKHGNEFILSTSEQPYLLDHMLAGYRDVSREFTFSAEDKPGSFPGLPGRVFMSQIPEWTSNVGYYNKSEYLRVEHAINHEVRGSIAVPIIDTLAEPPCCAVLELVTTKEKPDFDKELEIVSSALQLVNLRTTTPPRLMSQCLSNNKRAALTEIIDVSRAVCRAHSLPLALTWIPCYYSEGIGDEASRIRIKDGCKIPGEKTVLCIEESACYINDIVVGGFVRACVEHYLEEGQGVAGKALQSNRPFFYSDVKAYNISEYPLVHHARKYKLNAAVAVRLRSIHTNDDDYIIEFFLPVIMNGSQEQQLLLDNLSDTMQRMCQSLRIVSDDELYGIEGSQVQFSKEEGSSFFSMSRGNSHMAPEGDHDSVQPMSLTNNETEAAHNQAMDGSRKQTEKKKSTVEKNVSLSVLQQYFSGSLKDAAKSLGVCPTTLKRICRQHGIARWPSRKINKVNRSLKKIQTVLDSVQGVEGGLKFDPYKGGFIPGGSSNQEINAHKSSLFRKKCSGKYPDPASKDAVTVSPASGSKDSKPIGMDDGGLRQEPFPVSILESSRCDIVYHSPNTLVADEMENYLNGADKLGEHHNPTTSSMSDSSNGSGSRKFENRKHLKAKSPCVDKGSKIIVKAAYKEDMIRFKFDPAAGCLQLYEEVATRFKLQIGSFLLKYLDDEEEWVRMVNDSDLEECIEILDDLGTRAVKFLVSDMPSGLSSSGSNS

SEQ ID NO: 256 - protein, 921 aa, Arachis hypogaea
MEDQFFSEGEGIGYWTPPGAQFDGPSMIDNGIKNLVSEEMLDNLPDLMNFDNLAGWGNIPSVTDHNLDNGISSLASMPYSPPDAFSLVEQANDPYFMTKDCGNYNAIETSLGFDEKAVLQQLETQLGLSEDANDMNNINGSLQELSAADMGNCLVPRPFAWSLDEKMLRAMSLFKESVGDGILTQVWAPMKHGNEFILSTSEQPYLLDHMLAGYRDVSREFTFSAEDKPGSFPGLPGRVFMSQIPEWTSNVGYYNKSEYLRVEHAINHEVRGSIAVPIIDTLAEPPCCAVLELVTTKEKPDFDKELEIVSSALQLVNLRTTTPPRLMSQCLSNNKRAALTEIIDVLRAVCRAHSLPLALTWIPCYYSEGIGDEASRIRTKDGRKIPGEKTVLCIEESACYTNDIVVGGFVRACVEHYLEEGQGVAGKALQSNRPFFYPDVKAYNISEYPLVHHARKYKLNAAVAIRLRSIHTNDDDYIIEFFLPVNMNGSEEQQLLLDNLAGTMQRKCQTLRKVSDAELHGIEGSSFCSMSRGNSHMAPDGDHDSVQPMSVTNNETEAAHNQAMEGSRKQIEKKRSPVKKNFSLSVLQQYFSGNLKDAAKSLGVCPTTLKRICRQHGIARWPSRKINKVNRSLKKIQTVLDSGVEGGLKFDPYKGGFMSGGSSNQEINAHKSSLFRKKCSVKYPDPAAKDAVTISPASGSKGENLAVNQLLHSDILISNSKGELKKNKAFSVDVDSKPIAMGDGGLRQEPFPVSILESSRCDVAYHSPNSLVADEMETYLNGADKLGEHHNPTTSSMTDSSSGSCSILRPSSSGSPKFENRKHLKAKSPCVRRGSKIIVKAAYGENIIRFKFDPAAGCLQLYEEVATRFKLQIGSFQLEYLDDEDEWVRMVTDTDLEECIEMFDDLGTAVKFLVREPCSNS

SEQ ID NO: 257 - protein, 899 aa, Arachis hypogaea
MEDQFFSEGEGIGYWTPPGAQFDGPSMIDNGIKNLVSEEMLDNLPDLMNFDNLAGWGNIPSVTDHNLDNGISSLASMPYSPPDAFSLVEQANDPYFMTKDCGNYNAIETSLGFDEKAVLQQLETQLGLSEDANDMNNINGSLQELSAADMGNCLVPRPFAWSLDEKMLRAMSLFKESVGDGILTQVWAPMKHGNEFILSTSEQPYLLDHMLAGYRDVSREFTFSAEDKPGSFPGLPGRVFMSQIPEWTSNVGYYNKSEYLRVEHAINHEVRGSIAVPIIDTLAEPPCCAVLELVTTKEKPDFDKELEIVSSALQLVNLRTTTPPRLMSQCLSNNKRAALTEIIDVSRAVCRAHSLPLALTWIPCYYSEGIGDEASRIRIKDGCKIPGEKTVLCIEESACYINDIVVGGFVRACVKHYLEEGQGVAGKALQSNRPFFYSDVKAYNISEYPIVHHARKYKLNAAVAVRLRSIHTNDDDYIIEFFLPVIMNGSQEQQLLLDNLSDTMQRMCQSLRIVSDDELYGIEGSQVQFSKEEGSSFFSMYRGNSHMAPEGDHDSVQPMSLTNNETEAAHNQAMDGSRKQTEKKKSTVEKNVSLSVLQQYFSGSLKDAAKSLGVCPTTLKRICRQHGIARWPSRKINKVNRSLKKIQTVLDSVQGVEGGLKFDPFKGGFIPGGSSNQEINAHKSSLFRKKCSGKYPDPAAKDAVTVSPASGSKDSKPIGMDDGGLRQEPFPVSILESSRCDIAYHSPNTLVANEMENYLNGADKLGEHHNPATSSMSDSSNDSGSRKFENRKHLKAKSPCVDKGSKIIVKAAYKEDMIRFKFDPAAGCLQLYEQVATRFKLQIGSFLLKYLDDEEEWVRMVNDSDLEECIEILDDLGTRAVKFLVSDMPSCLSSSGSNS

SEQ ID NO: 258 - protein, 894 aa, Arachis hypogaea
MEDQFFSEGEGIGYWTPPGAQFDGPSMIDNGIKNLVSEEMLDNLPDLMNFDNLAGWGNIPSVTDHNLDNGISSLASMPYSPPDAFSLVEQANDPYFMTKDCGNYNAIETSLGFDEKAVLQQLETQLGLSEDANDMNNINGSLQELSAADMGNCLVPRPFAWSLDEKMLRAMSLFKESVGDGILTQVWAPMKHGNEFILSTSEQPYLLDHMLAGYRDVSREFTFSAEDKPGSFPGLPGRVFMSQIPEWTSNVGYYNKSEYLRVEHAINHEVRGSIAVPIIDTLAEPPCCAVLELVTTKEKPDFDKELEIVSSALQLVNLRTTTPPRLMSQCLSNNKRAALTEIIDVLRAVCRAHSLPLALTWIPCYYSEGIGDEASRIRTKDGRKIPGEKTVLCIEESACYTNDIVVGGFVRACVEHYLEEGQGVAGKALQSNRPFFYPDVKAYNISEYPLVHHARKYKLNAAVAIRLRSIHTNDDDYIIEFFLPVNMNGSEEQQLLLDNLAGTMQRKCQTLRKVSDAELHGIEGSSFCSMSRGNSHMAPDGDHDSVQPMSVTNNETEAAHNQAMEGSRKQIEKKRSPVKKNFSLSVLQQYFSGNLKDAAKSLGVCPTTLKRICRQHGIARWPSRKINKVNRSLKKIQTVLDSGVEGGLKFDPYKGGFMSGGSSNQEINAHKSSLFRKKCSVKYPDPAAKDAVTISPASGSKAFSVDVDSKPIAMGDGGLRQEPFPVSILESSRCDVAYHSPNSLVADEMETYLNGADKLGEHHNPTTSSMTDSSSGSCSILRPSSSGSPKFENRKHLKAKSPCVRRGSKIIVKAAYGENIIRFKFDPAAGCLQLYEEVATRFKLQIGSFQLEYLDDEDEWVRMVTDTDLEECIEMFDDLGTAVKFLVREPCSNS

SEQ ID NO: 259 - protein, 890 aa, Arachis hypogaea
MEDQFFSEGEGIGYWTPPGAQFDGPSMIDNGIKNLVSEEMLDNLPDLMNFDNLAGWVEQANDPYFMTKDCGNYNAIETSLGFDEKAVLQQLETQLGLSEDANDMNNINGSLQELSAADMGNCLVPRPFAWSLDEKMLRAMSLFKESVGDGILTQVWAPMKHGNEFILSTSEQPYLLDHMLAGYRDVSREFTFSAEDKPGSFPGLPGRVFMSQIPEWTSNVGYYNKSEYLRVEHAINHEVRGSIAVPIIDTLAEPPCCAVLELVTTKEKPDFDKELEIVSSALQLVNLRTTTPPRLMSQCLSNNKRAALTEIIDVLRAVCRAHSLPLALTWIPCYYSEGIGDEASRIRTKDGRKIPGEKTVLCIEESACYTNDIVVGGFVRACVEHYLEEGQGVAGKALQSNRPFFYPDVKAYNISEYPLVHHARKYKLNAAVAIRLRSIHTNDDDYIIEFFLPVNMNGSEEQQLLLDNLAGTMQRKCQTLRKVSDAELHGIEGSSFCSMSRGNSHMAPDGDHDSVQPMSVTNNETEAAHNQAMEGSRKQIEKKRSPVKKNFSLSVLQQYFSGNLKDAAKSLGVCPTTLKRICRQHGIARWPSRKINKVNRSLKKIQTVLDSGVEGGLKFDPYKGGFMSGGSSNQEINAHKSSLFRKKCSVKYPDPAAKDAVTISPASGSKGENLAVNQLLHSDILISNSKGELKKNKAFSVDVDSKPIAMGDGGLRQEPFPVSILESSRCDVAYHSPNSLVADEMETYLNGADKLGEHHNPTTSSMTDSSSGSCSILRPSSSGSPKFENRKHLKAKSPCVRRGSKIIVKAAYGENIIRFKFDPAAGCLQLYEEVATRFKLQIGSFQLEYLDDEDEWVRMVTDTDLEECIEMFDDLGTAVKFLVREPCSNS

SEQ ID NO: 260 - protein, 888 aa, Arachis hypogaea
MEDQFFSEGEGIGYWTPPGAQFDGPSMIDNGIKNLVSEEMLDNLPDLMNFDNLAGWGNIPSVTDHNLDNGISSLASMPYSPPDAFSLVEQANDPYFMTKDCGNYNAIETSLGFDEKAVLQQLETQLGLSEDANDMNNINGSLQELSAADMGNCLVPRPFAWSLDEKMLRAMSLFKESVGDGILTQVWAPMKHGNEFILSTSEQPYLLDHMLAGYRDVSREFTFSAEDKPGSFPGLPGRVFMSQIPEWTSNVGYYNKSEYLRVEHAINHEVRGSIAVPIIDTLAEPPCCAVLELVTTKEKPDFDKELEIVSSALQLVNLRTTTPPRLMSQCLSNNKRAALTEIIDVLRAVCRAHSLPLALTWIPCYYSEGIGDEASRIRTKDGRKIPGEKTVLCIEESACYTNDIVVGGFVRACVEHYLEEGQGVAGKALQSNRPFFYPDVKAYNISEYPLVHHARKYKLNAAVAIRLRSIHTNDDDYIIEFFLPVNMNGSEEQQLLLDNLAGTMQRKCQTLRKVSDAELHGIEGSSFCSMSRGNSHMAPDGDHDSVQPMSVTNNETEAAHNQAMEGSRKQIEKKRSPVKKNFSLSVLQQYFSGNLKDAAKSLGVCPTTLKRICRQHGIARWPSRKINKVNRSLKKIQTVLDSGVEGGLKFDPYKGGFMSGGSSNQEINAHKSSLFRKKCSVKYPDPAAKDAVTISPASGSKDSKPIAMGDGGLRQEPFPVSILESSRCDVAYHSPNSLVADEMETYLNGADKLGEHHNPTTSSMTDSSSGSCSILRPSSSGSPKFENRKHLKAKSPCVRRGSKIIVKAAYGENIIRFKFDPAAGCLQLYEEVATRFKLQIGSFQLEYLDDEDEWVRMVTDTDLEECIEMFDDLGTAVKFLVREPCSNS

SEQ ID NO: 261 - protein, 825 aa, Arachis hypogaea
MTKDCGNYNAIETSLGFDEKAVLQQLETQLGLSEDANDMNNINGSLQELSAADMGNCLVPRPFAWSLDEKMLRAMSLFKESVGDGILTQVWAPMKHGNEFILSTSEQPYLLDHMLAGYRDVSREFTFSAEDKPGSFPGLPGRVFMSQIPEWTSNVGYYNKSEYLRVEHAINHEVRGSIAVPIIDTLAEPPCCAVLELVTTKEKPDFDKELEIVSSALQLVNLRTTTPPRLMSQCLSNNKRAALTEIIDVLRAVCRAHSLPLALTWIPCYYSEGIGDEASRIRTKDGRKIPGEKTVLCIEESACYTNDIVVGGFVRACVEHYLEEGQGVAGKALQSNRPFFYPDVKAYNISEYPLVHHARKYKLNAAVAIRLRSIHTNDDDYIIEFFLPVNMNGSEEQQLLLDNLAGTMQRKCQTLRKVSDAELHGIEGSSFCSMSRGNSHMAPDGDHDSVQPMSVTNNETEAAHNQAMEGSRKQIEKKRSPVKKNFSLSVLQQYFSGNLKDAAKSLGVCPTTLKRICRQHGIARWPSRKINKVNRSLKKIQTVLDSGVEGGLKFDPYKGGFMSGGSSNQEINAHKSSLFRKKCSVKYPDPAAKDAVTISPASGSKGENLAVNQLLHSDILISNSKGELKKNKAFSVDVDSKPIAMGDGGLRQEPFPVSILESSRCDVAYHSPNSLVADEMETYLNGADKLGEHHNPTTSSMTDSSSGSCSILRPSSSGSPKFENRKHLKAKSPCVRRGSKIIVKAAYGENIIRFKFDPAAGCLQLYEEVATRFKLQIGSFQLEYLDDEDEWVRMVTDTDLEECIEMFDDLGTAVKFLVREPCSNS

SEQ ID NO: 262 - protein, 875 aa, Arachis hypogaea
MEDQFFSEGEGIGYWTPPGAQFDGPSMIDNGIKNLVSEEKLDNLPDLMNFDNLAGWGNIPSVTDHNLDNGISSLASMPYSPPDAYSLVEQANDPYFMTKDCGNYNAIETSLGFDDKVVLQQLETQLGLSEDANDMNNINGSLQELSAADMGNCLVPRPFAWSLDEKMLRAMNLFKESVGDGILTQVWAPMKHGNDFILSTSEQPYLLDHMLAGYRDVSREFTFSAEDKPGSFPGLPGRVFMSQIPEWTSNVGYYNKSEYMRVEHAINHEVRGSIAVPIIDTLAEPPCCAVLELVTTKEKPDFDKELKIVSSALQLVNLRTTTSPRLMSQCLSNNKRAALTEIIDVLRAVCHAHSLPLALTWIPCYYSEGIGDEASRIRIKDGGKIPGEKTVLCIEESACYINDIVVGGFVHACVEHYLEEGQGVAGKALQLNRPFFYSDVKAYNISEYPLVHHARKYKLNAAVAVRLRSIHTNDDDYMIEFFLPVNMNGSQEQQLLLDNLSGTMQRMCQSLRTVSDAKLYGIEGSQVQFSKEEGSSFCSMSRGNSHMAPDGDHDSVQPMSVTNNETEAAHNQAMDGSRKQIEKKKSPVEKNVSLSVLQQYFSGSLKDAAKSLGVCPTTLKRICRQHGIARWPSRKINKVNHSLKKIQTVLDSVQGVEGGLKFDPYKGGFMPGGSSNQEINAHKSSLFWKKCSGKFPDPASKDAVTVSPASGSKDSKPIAMDDGGLRQEPFRVSILESSRCDIAYHSPNTLGEHHNPTTSSMSDSSNGSGSRKFENRKHLKAKSPCLDKGSKISVKAAYKEDMIRFKFDPAAGCLQLYEEVATRFKLQIGSFLLKYLDDEEKWVMMVNDSDLEEFIEISDDLRTRAVKFLVSDLVV

SEQ ID NO: 263 - protein, 844 aa, Arachis hypogaea
MEDQFFSEGEGIGYWTPPGAQFDGPSMIDNGIKNLVSEEKLDNLPDLMNFDNLAGWVEQANDPYFMTKDCGNYNAIETSLGFDDKVVLQQLETQLGLSEDANDMNNINGSLQELSAADMGNCLVPRPFAWSLDEKMLRAMNLFKESVGDGILTQVWAPMKHGNDFILSTSEQPYLLDHMLAGYRDVSREFTFSAEDKPGSFPGLPGRVFMSQIPEWTSNVGYYNKSEYMRVEHAINHEVRGSIAVPIIDTLAEPPCCAVLELVTTKEKPDFDKELKIVSSALQLVNLRTTTSPRLMSQCLSNNKRAALTEIIDVLRAVCHAHSLPLALTWIPCYYSEGIGDEASRIRIKDGGKIPGEKTVLCIEESACYINDIVVGGFVHACVEHYLEEGQGVAGKALQLNRPFFYSDVKAYNISEYPLVHHARKYKLNAAVAVRLRSIHTNDDDYMIEFFLPVNMNGSQEQQLLLDNLSGTMQRMCQSLRTVSDAKLYGIEGSQVQFSKEEGSSFCSMSRGNSHMAPDGDHDSVQPMSVTNNETEAAHNQAMDGSRKQIEKKKSPVEKNVSLSVLQQYFSGSLKDAAKSLGVCPTTLKRICRQHGIARWPSRKINKVNHSLKKIQTVLDSVQGVEGGLKFDPYKGGFMPGGSSNQEINAHKSSLFWKKCSGKFPDPASKDAVTVSPASGSKDSKPIAMDDGGLRQEPFRVSILESSRCDIAYHSPNTLGEHHNPTTSSMSDSSNGSGSRKFENRKHLKAKSPCLDKGSKISVKAAYKEDMIRFKFDPAAGCLQLYEEVATRFKLQIGSFLLKYLDDEEKWVMMVNDSDLEEFIEISDDLRTRAVKFLVSDLVV

SEQ ID NO: 264 - protein, 779 aa, Arachis hypogaea
MTKDCGNYNAIETSLGFDDKVVLQQLETQLGLSEDANDMNNINGSLQELSAADMGNCLVPRPFAWSLDEKMLRAMNLFKESVGDGILTQVWAPMKHGNDFILSTSEQPYLLDHMLAGYRDVSREFTFSAEDKPGSFPGLPGRVFMSQIPEWTSNVGYYNKSEYMRVEHAINHEVRGSIAVPIIDTLAEPPCCAVLELVTTKEKPDFDKELKIVSSALQLVNLRTTTSPRLMSQCLSNNKRAALTEIIDVLRAVCHAHSLPLALTWIPCYYSEGIGDEASRIRIKDGGKIPGEKTVLCIEESACYINDIVVGGFVHACVEHYLEEGQGVAGKALQLNRPFFYSDVKAYNISEYPLVHHARKYKLNAAVAVRLRSIHTNDDDYMIEFFLPVNMNGSQEQQLLLDNLSGTMQRMCQSLRTVSDAKLYGIEGSQVQFSKEEGSSFCSMSRGNSHMAPDGDHDSVQPMSVTNNETEAAHNQAMDGSRKQIEKKKSPVEKNVSLSVLQQYFSGSLKDAAKSLGVCPTTLKRICRQHGIARWPSRKINKVNHSLKKIQTVLDSVQGVEGGLKFDPYKGGFMPGGSSNQEINAHKSSLFWKKCSGKFPDPASKDAVTVSPASGSKDSKPIAMDDGGLRQEPFRVSILESSRCDIAYHSPNTLGEHHNPTTSSMSDSSNGSGSRKFENRKHLKAKSPCLDKGSKISVKAAYKEDMIRFKFDPAAGCLQLYEEVATRFKLQIGSFLLKYLDDEEKWVMMVNDSDLEEFIEISDDLRTRAVKFLVSDLVV

SEQ ID NO: 265 - protein, 863 aa, Arachis hypogaea
MEDQFFSEGEGIGYWTPPGAQFDGPSMIDNGIKNLVSEEMLDNLPDLMNFDNLAGWGNIPSVTDRNLDNGISSLASMQYSPPDAFNLVEQDNDPYFMTKDCGNYNATETSLGFDEKAVLQQLETQLGLSEDANDMNNINGSLQELSAADMGNCLVPRPFAWSLDERMLRAMDLFKESVGDGILTQVWAPMKHGNDFILSTSEQPYLLDHMLAGYRDVSRQFTFSAEDKPGSFPGLPGRVFISQIPEWTSNVGYYNKSEYLRVEHAINHEVRGSIAVPIIDTLAEPPCCAVLELVTTKEKTDFDKELEIVSSALQLVNLRTTTPPRLMSQCLSNNKRAALTEIIDVLRAVCNAHRLPLALTWIPCYYSEGVGDEASRIRIKDGRKIPGEKTVLCIEESACYINDIVVGGFVHACVEHYLEEGQGVAGKALQSNRSSFYSDVKAYNISEYPLVHHARKYKLNAAVAVRLRSIHTNDDDYIIEFFLPVNMNGSEEQQLLLDNLSDTVQRMCQSLRIVSDAELHGVEGSQVQFSKEEGSHMAPDGDHDLVQPMSMTNNETEAAHNQAMDGSRKQTEKKKSSVEKNFSLSVLQQYFSGSLKDAAKSLGVCPTTLKRICRQHGISRWPSRKINKVNRSLKKIQTVLDSVKGVEGGLEFDPYKGGFMPGGSSNQEINAHKSSLFGKKCSGSKDSKPIAMDDGGLRQEPFPVSILESSWCDIAYHSPNTLVADEMADKLGEHHNPTTSSMSDSSNGSGSILRGSRKFEKRKHLKAKSPCVDSGSKINVKAVYKEDMIRFKFDPAAGCLQLYEEVATRFKLQIGSFQLKYLDDDEEWVMIVTDSDLQECIEILDDLGTRAVKFLVRETCLVV

SEQ ID NO: 266 - protein, 832 aa, Arachis hypogaea
MEDQFFSEGEGIGYWTPPGAQFDGPSMIDNGIKNLVSEEMLDNLPDLMNFDNLAGWVEQDNDPYFMTKDCGNYNATETSLGFDEKAVLQQLETQLGLSEDANDMNNINGSLQELSAADMGNCLVPRPFAWSLDERMLRAMDLFKESVGDGILTQVWAPMKHGNDFILSTSEQPYLLDHMLAGYRDVSRQFTFSAEDKPGSFPGLPGRVFISQIPEWTSNVGYYNKSEYLRVEHAINHEVRGSIAVPIIDTLAEPPCCAVLELVTTKEKTDFDKELEIVSSALQLVNLRTTTPPRLMSQCLSNNKRAALTEIIDVLRAVCNAHRLPLALTWIPCYYSEGVGDEASRIRIKDGRKIPGEKTVLCIEESACYINDIVVGGFVHACVEHYLEEGQGVAGKALQSNRSSFYSDVKAYNISEYPLVHHARKYKLNAAVAVRLRSIHTNDDDYIIEFFLPVNMNGSEEQQLLLDNLSDTVQRMCQSLRIVSDAELHGVEGSQVQFSKEEGSHMAPDGDHDLVQPMSMTNNETEAAHNQAMDGSRKQTEKKKSSVEKNFSLSVLQQYFSGSLKDAAKSLGVCPTTLKRICRQHGISRWPSRKINKVNRSLKKIQTVLDSVKGVEGGLEFDPYKGGFMPGGSSNQEINAHKSSLFGKKCSGSKDSKPIAMDDGGLRQEPFPVSILESSWCDIAYHSPNTLVADEMADKLGEHHNPTTSSMSDSSNGSGSILRGSRKFEKRKHLKAKSPCVDSGSKINVKAVYKEDMIRFKFDPAAGCLQLYEEVATRFKLQIGSFQLKYLDDDEEWVMIVTDSDLQECIEILDDLGTRAVKFLVRETCLVV

SEQ ID NO: 267 - protein, 767 aa, Arachis hypogaea
MTKDCGNYNATETSLGFDEKAVLQQLETQLGLSEDANDMNNINGSLQELSAADMGNCLVPRPFAWSLDERMLRAMDLFKESVGDGILTQVWAPMKHGNDFILSTSEQPYLLDHMLAGYRDVSRQFTFSAEDKPGSFPGLPGRVFISQIPEWTSNVGYYNKSEYLRVEHAINHEVRGSIAVPIIDTLAEPPCCAVLELVTTKEKTDFDKELEIVSSALQLVNLRTTTPPRLMSQCLSNNKRAALTEIIDVLRAVCNAHRLPLALTWIPCYYSEGVGDEASRIRIKDGRKIPGEKTVLCIEESACYINDIVVGGFVHACVEHYLEEGQGVAGKALQSNRSSFYSDVKAYNISEYPLVHHARKYKLNAAVAVRLRSIHTNDDDYIIEFFLPVNMNGSEEQQLLLDNLSDTVQRMCQSLRIVSDAELHGVEGSQVQFSKEEGSHMAPDGDHDLVQPMSMTNNETEAAHNQAMDGSRKQTEKKKSSVEKNFSLSVLQQYFSGSLKDAAKSLGVCPTTLKRICRQHGISRWPSRKINKVNRSLKKIQTVLDSVKGVEGGLEFDPYKGGFMPGGSSNQEINAHKSSLFGKKCSGSKDSKPIAMDDGGLRQEPFPVSILESSWCDIAYHSPNTLVADEMADKLGEHHNPTTSSMSDSSNGSGSILRGSRKFEKRKHLKAKSPCVDSGSKINVKAVYKEDMIRFKFDPAAGCLQLYEEVATRFKLQIGSFQLKYLDDDEEWVMIVTDSDLQECIEILDDLGTRAVKFLVRETCLVV

SEQ ID NO: 268 - protein, 582 aa, Arachis hypogaea
MLYFHMDLKTSYSDWLFSVRCLSNNKRAALTEIIDVLRAVCGAHSLPLALTWIPCYYSEGIGDEASRIRTKEGRKLPGEKTVLCIEESACYMNDIVVGGFVRACVEHYLEEGQGAAGKALQSNRPFFCPDVKAYNISEYPLVHHARKYKLNAAVAIRLRSTHTNDDDYIIEFFLPVNMNRCQEQQVLLENLSRTMQRMCQTLRKVSDAELYGIEGSQVQFSKEEGSHMAPDGNHDNHDSVQPMSMTNNETEAAHNQAMEGSRKQIEKKRSPVKKNVSLSVLQQYFSCNLKDAAKSLGVCPTTLKRICRQHGIARWPSRKINKVNRSLKKIRTVLDSVQGVEGGLKFDPYKGGFISVGSSNQEINAHKSSLFRKKCSVKYPDPASGSKDSKPIAMGDGGLRQEPFPVSILESSRCDIAYHSPNSLVADEMETYLNGADKLGEHYNPTTSSMTDSSNGSCSILRSSSSASGKFENRKHLKAKSPCVDSGSKIIVKAAYGEDLIRFKFDPAAGCLQLYEEVAARFKLQIGSFQLKYLDDEEEWVRMVNDSDLEDCIEMLDDLGTRAVKLLVHDMPSGLSSLGSNG

SEQ ID NO: 269 - protein, 832 aa, Arachis hypogaea
MEDQFFSEGEGIGYWTPPGAQFDGPSMIDNGIKNLVSEEMLDNLPDLMNFDNLAGWVEQDNDPYFMTKDCGNYNATETSLGFDEKAVLQQLETQLGLSEDANDMNNINGSLQELSAADMGNCLVPRPFAWSLDERMLRAMDLFKESVGDGILTQVWAPMKHGNDFILSTSEQPYLLDHMLAGYRDVSRQFTFSAEDKPGSFPGLPGRVFISQIPEWTSNVGYYNKSEYLRVEHAINHEVRGSIAVPIIDTLAEPPCCAVLELVTTKEKTDFDKELEIVSSALQLVNLRTTTPPRLMSQCLSNNKRAALTEIIDVLRAVCNAHRLPLALTWIPCYYSEGVGDEASRIRIKDGRKIPGEKTVLCIEESACYINDIVVGGFVHACVEHYLEEGQGVAGKALQSNRSSFYSDVKAYNISEYPLVHHARKYKLNAAVAVRLRSIHTNDDDYIIEFFLPVNMNGSEEQQLLLDNLSDTVQRMCQSLRIVSDAELHGVEGSQVQFSKEEGSHMAPDGDHDLVQPMSMTNNETEAAHNQAMDGSRKQTEKKKSSVEKNFSLSVLQQYFSGSLKDAAKSLGVCPTTLKRICRQHGISRWPSRKINKVNRSLKKIQTVLDSVKGVEGGLEFDPYKGGFMPGGSSNQEINAHKSSLFGKKCSGSKDSKPIAMDDGGLRQEPFPVSILESSWCDIAYHSPNTLVADEMADKLGEHHNPTTSSMSDSSNGSGSILRGSRKFEKRKHLKAKSPCVDSGSKINVKAVYKEDMIRFKFDPAAGCLQLYEEVATRFKLQIGSFQLKYLDDDEEWVMIVTDSDLQECIEILDDLGTRAVKFLVSETCLVV

SEQ ID NO: 270 - protein, 767 aa, Arachis hypogaea
MTKDCGNYNATETSLGFDEKAVLQQLETQLGLSEDANDMNNINGSLQELSAADMGNCLVPRPFAWSLDERMLRAMDLFKESVGDGILTQVWAPMKHGNDFILSTSEQPYLLDHMLAGYRDVSRQFTFSAEDKPGSFPGLPGRVFISQIPEWTSNVGYYNKSEYLRVEHAINHEVRGSIAVPIIDTLAEPPCCAVLELVTTKEKTDFDKELEIVSSALQLVNLRTTTPPRLMSQCLSNNKRAALTEIIDVLRAVCNAHRLPLALTWIPCYYSEGVGDEASRIRIKDGRKIPGEKTVLCIEESACYINDIVVGGFVHACVEHYLEEGQGVAGKALQSNRSSFYSDVKAYNISEYPLVHHARKYKLNAAVAVRLRSIHTNDDDYIIEFFLPVNMNGSEEQQLLLDNLSDTVQRMCQSLRIVSDAELHGVEGSQVQFSKEEGSHMAPDGDHDLVQPMSMTNNETEAAHNQAMDGSRKQTEKKKSSVEKNFSLSVLQQYFSGSLKDAAKSLGVCPTTLKRICRQHGISRWPSRKINKVNRSLKKIQTVLDSVKGVEGGLEFDPYKGGFMPGGSSNQEINAHKSSLFGKKCSGSKDSKPIAMDDGGLRQEPFPVSILESSWCDIAYHSPNTLVADEMADKLGEHHNPTTSSMSDSSNGSGSILRGSRKFEKRKHLKAKSPCVDSGSKINVKAVYKEDMIRFKFDPAAGCLQLYEEVATRFKLQIGSFQLKYLDDDEEWVMIVTDSDLQECIEILDDLGTRAVKFLVSETCLVV

SEQ ID NO: 271 - protein, 870 aa, Arachis ipaensis
MEPYPYSPKRSGASYWGSCRVQLEGSTSLDGDMSNSISDDMACSFSGLMNIDPYAGLYNSPSITDQVFSNGLPSSYPSTPGFNLEENNSSQFFMTEMNGYFNTKQGSPGYGEKIAFQQMDPLLGFFDGTDDTHSLSSMQKINGSSQHLDAIGSYIMSKPASLSLDERMLKALSVFKESAGGGILAQVWVPIKDGDQFFLTTSEQPYLLDQILAGYREVSRTYTFSTEGKPGSLPGLPGRVFMSKTPEWTSNIGYYNKNEYLRMDDAINHEVRGSIGLPISDLHSELPCCAVLELVTTNEKPDFEKEMDIVCHALQNVDLMANMPPRLLPQCLSNSKRAALTAIVDVLRSVCHAHRLPMALTWIPCCVAEDAEGKDTKIHIKEGHSSPREKNILCVEESACYVTDKAMEGFVHACIEHHLQEGKGIAGRAHQSNHPFFCPDVKAYNISEYPLVHHARKYNLNAAVAIRLRSTYTNDDDYILEFFLPVNMKGSSEQQLLLDNLSGTMQKVCRNLRTVSDEELSRMKSSQVGFKNKNVPRIFPMSRRNSQIPLTNSNHDSVRKMSIKASNQGNNGIESSHNQERNRSRRMVETKRPAEKKVSLSVLQQHFSGTLKDAARSIGVCPTTLKRICRKQGISRWPSRKIKKVNRSLKKIQTVLDTVEGLEGGLKFDPCIGALVSREGESIIQEIDAHDTLLHPENVTAKEKWILNKGGSREDKSKHSSILVNRDDDGAVEHNHPSSSGFTNSSNDSGSNQRQNLKGKSTFADKTGLKLQAKATYGEDTVRFKFDPSWGCLKLYEEVATRFKLQNGSFQLKYLDDEQELVRLLDDSDLQECIEILDEAGKSCVRFVVRDIPCNLSSSSCSSCYLGCDS

SEQ ID NO: 272 - skipped

SEQ ID NO: 273 - protein, 875 aa, Arachis ipaensis
MEDQFFSEGEGIGYWTPPGAQFDGPSMIDNGIKNLVSEEKLDNLPDLMNFDNLAGWGNIPSVTDHNLDNGISSLASMPYSPPDAYSLVEQANDPYFMTKDCGNYNAIETSLGFDEKAVLQQLETQLGLSEDANDMNNINGSLQELSAADMGNCLVPRPFAWSLDEKMLRAMNLFKESVGDGILTQVWAPMKHGNDFILSTSEQPYLLDHMLAGYRDVSREFTFSAEDKPGSFPGLPGRVFMSQIPEWTSNVGYYNKSEYLRVEHAINHEVRGSIAVPIIDTLAEPPCCAVLELVTTKEKPDFDKELEIVSSALQLVNLRTTTSPRLMSQCLSNNKRAALTEIIDVLRAVCHAHSLPLALTWIPCYYSEGIGDEASRIRIKDGGKIPGEKTVLCIEESACYINDIVVGGFVHACVEHYLEEGQGVAGKALQLNRPFFYSDVKAYNISEYPLVHHARKYKLNAAVAVRLRSIHTNDDDYMIEFFLPVNMNGSQEQQLLLDNLSGTMQRMCQSLRTVSDAKLYGIEGSQVQFSKEEGSSFCSMSRGNSHMAPDGDHDSVQPMSVTNNETEAAHNQAMDGSRKQIEKKKSPVEKNVSLSVLQQYFSGSLKDAAKSLGVCPTTLKRICRQHGIARWPSRKINKVNHSLKKIQTVLDSVQGVEGGLKFDPYKGGFMPGGSSNQEINAHKSSLFWKKCSGKFPDPASKDAVTVSPASGSKDSKPIAMDDGGLRQEPFRVSILESSRCDIAYHSPNTLGEHHNPTTSSMSDSSNGSGSRKFENRKHLKAKSPCLDKGSKIIVKAAYKEDMIRFKFDPAAGCLQLYEQVATRFKLQIGSFQLKYLDDEEKWVMMVNDSDLEEFIEISDDLRTRAVKFLVSDLVV

SEQ ID NO: 274 - protein, 865 aa, Arachis ipaensis
MEDQFFSEGEGIGYWTPPGAQFDGPSMIDNGIKNLVSEEKLDNLPDLMNFDNLAGWGNIPSVTDHNLDNGISSLASMPYSPPDAYSLVEQANDPYFMTKDCGNYNAIETSLGFDEKAVLQQLETQLGLSEDANDMNNINGSLQELSAADMGNCLVPRPFAWSLDEKMLRAMNLFKESVGDGILTQVWAPMKHGNDFILSTSEQPYLLDHMLAGYRDVSREFTFSAEDKPGSFPGLPGRVFMSQIPEWTSNVGYYNKSEYLRVEHAINHEVRGSIAVPIIDTLAEPPCCAVLELVTTKEKPDFDKELEIVSSALQLVNLRTTTSPRLMSQCLSNNKRAALTEIIDVLRAVCHAHSLPLALTWIPCYYSEGIGDEASRIRIKDGGKIPGEKTVLCIEESACYINDIVVGGFVHACVEHYLEEGQGVAGKALQLNRPFFYSDVKAYNISEYPLVHHARKYKLNAAVAVRLRSIHTNDDDYMIEFFLPVNMNGSQEQQLLLDNLSGTMQRMCQSLRTVSDAKLYGIEGSQVQFSKEEGSHMAPDGDHDSVQPMSVTNNETEAAHNQAMDGSRKQIEKKKSPVEKNVSLSVLQQYFSGSLKDAAKSLGVCPTTLKRICRQHGIARWPSRKINKVNHSLKKIQTVLDSVQGVEGGLKFDPYKGGFMPGGSSNQEINAHKSSLFWKKCSGKFPDPASKDAVTVSPASGSKDSKPIAMDDGGLRQEPFRVSILESSRCDIAYHSPNTLGEHHNPTTSSMSDSSNGSGSRKFENRKHLKAKSPCLDKGSKIIVKAAYKEDMIRFKFDPAAGCLQLYEQVATRFKLQIGSFQLKYLDDEEKWVMMVNDSDLEEFIEISDDLRTRAVKFLVSDLVV

SEQ ID NO: 275 - protein, 865 aa, Arachis ipaensis
MEDQFFSEGEGIGYWTPPGAQFDGPSMIDNGIKNLVSEEKLDNLPDLMNFDNLAGWGNIPSVTDHNLDNGISSLASMPYSPPDAYSLVEQANDPYFMTKDCGNYNAIETSLGFDEKAVLQQLETQLGLSEDANDMNNINGSLQELSAADMGNCLVPRPFAWSLDEKMLRAMNLFKESVGDGILTQVWAPMKHGNDFILSTSEQPYLLDHMLAGYRDVSREFTFSAEDKPGSFPGLPGRVFMSQIPEWTSNVGYYNKSEYLRVEHAINHEVRGSIAVPIIDTLAEPPCCAVLELVTTKEKPDFDKELEIVSSALQLVNLRTTTSPRLMSQCLSNNKRAALTEIIDVLRAVCHAHSLPLALTWIPCYYSEGIGDEASRIRIKDGGKIPGEKTVLCIEESACYINDIVVGGFVHACVEHYLEEGQGVAGKALQLNRPFFYSDVKAYNISEYPLVHHARKYKLNAAVAVRLRSIHTNDDDYMIEFFLPVNMNGSQEQQLLLDNLSGTMQRMCQSLRTVSDAKLYGIEGSQVQFSKEEGSSFCSMSRGNSHMAPDGDHDSVQPMSVTNNETEAAHNQAMDGSRKQIEKKKSPVEKNVSLSVLQQYFSGSLKDAAKSLGVCPTTLKRICRQHGIARWPSRKINKVNHSLKKIQTVLDSVQGVEGGLKFDPYKGGFMPGGSSNQEINAHKSSLFWKKCSGKFPDPASGSKDSKPIAMDDGGLRQEPFRVSILESSRCDIAYHSPNTLGEHHNPTTSSMSDSSNGSGSRKFENRKHLKAKSPCLDKGSKIIVKAAYKEDMIRFKFDPAAGCLQLYEQVATRFKLQIGSFQLKYLDDEEKWVMMVNDSDLEEFIEISDDLRTRAVKFLVSDLVV

SEQ ID NO: 276 - protein, 847 aa, Arachis ipaensis
MEDQFFSEGEGIGYWTPPGAQFDGPSMIDNGIKNLVSEEKLDNLPDLMNFDNLAGWGNIPSVTDHNLDNGISSLASMPYSPPDAYSLVEQANDPYFMTKDCGNYNAIETSLGFDEKAVLQQLETQLGLSEDANDMNNINGSLQELSAADMGNCLVPRPFAWSLDEKMLRAMNLFKESVGDGILTQVWAPMKHGNDFILSTSEQPYLLDHMLAGYRDVSREFTFSAEDKPGSFPGLPGRVFMSQIPEWTSNVGYYNKSEYLRVEHAINHEVRGSIAVPIIDTLAEPPCCAVLELVTTKEKPDFDKELEIVSSALQLVNLRTTTSPRLMSQCLSNNKRAALTEIIDVLRAVCHAHSLPLALTWIPCYYSEGIGDEASRIRIKDGGKIPGEKTVLCIEESACYINDIVVGGFVHACVEHYLEEGQGVAGKALQLNRPFFYSDVKAYNISEYPLVHHARKYKLNAAVAVRLRSIHTNDDDYMIEFFLPVNMNGSQEQQLLLDNLSGTMQRMCQSLRTVSDAKLYGIEGSQVQFSKEEGSHMAPDGDHDSVQPMSVTNNETEAAHNQAMDGSRKQIEKKKSPVEKNVSLSVLQQYFSGSLKDAAKSLGVCPTTLKRICRQHGIARWPSRKINKVNHSLKKIQTVLDSVQGVEGGLKFDPYKGGFMPGGSSNQEINAHKSSLFWKKCSGSKDSKPIAMDDGGLRQEPFRVSILESSRCDIAYHSPNTLGEHHNPTTSSMSDSSNGSGSRKFENRKHLKAKSPCLDKGSKIIVKAAYKEDMIRFKFDPAAGCLQLYEQVATRFKLQIGSFQLKYLDDEEKWVMMVNDSDLEEFIEISDDLRTRAVKFLVSDLVV

SEQ ID NO: 277 - protein, 834 aa, Arachis ipaensis
MEDQFFSEGEGIGYWTPPGAQFDGPSMIDNGIKNLVSEEKLDNLPDLMNFDNLAGWVEQANDPYFMTKDCGNYNAIETSLGFDEKAVLQQLETQLGLSEDANDMNNINGSLQELSAADMGNCLVPRPFAWSLDEKMLRAMNLFKESVGDGILTQVWAPMKHGNDFILSTSEQPYLLDHMLAGYRDVSREFTFSAEDKPGSFPGLPGRVFMSQIPEWTSNVGYYNKSEYLRVEHAINHEVRGSIAVPIIDTLAEPPCCAVLELVTTKEKPDFDKELEIVSSALQLVNLRTTTSPRLMSQCLSNNKRAALTEIIDVLRAVCHAHSLPLALTWIPCYYSEGIGDEASRIRIKDGGKIPGEKTVLCIEESACYINDIVVGGFVHACVEHYLEEGQGVAGKALQLNRPFFYSDVKAYNISEYPLVHHARKYKLNAAVAVRLRSIHTNDDDYMIEFFLPVNMNGSQEQQLLLDNLSGTMQRMCQSLRTVSDAKLYGIEGSQVQFSKEEGSHMAPDGDHDSVQPMSVTNNETEAAHNQAMDGSRKQIEKKKSPVEKNVSLSVLQQYFSGSLKDAAKSLGVCPTTLKRICRQHGIARWPSRKINKVNHSLKKIQTVLDSVQGVEGGLKFDPYKGGFMPGGSSNQEINAHKSSLFWKKCSGKFPDPASKDAVTVSPASGSKDSKPIAMDDGGLRQEPFRVSILESSRCDIAYHSPNTLGEHHNPTTSSMSDSSNGSGSRKFENRKHLKAKSPCLDKGSKIIVKAAYKEDMIRFKFDPAAGCLQLYEQVATRFKLQIGSFQLKYLDDEEKWVMMVNDSDLEEFIEISDDLRTRAVKFLVSDLVV

SEQ ID NO: 278 - protein, 779 aa, Arachis ipaensis
MEDQFFSEGEGIGYWTPPGAQFDGPSMIDNGIKNLVSEEKLDNLPDLMNFDNLAGWGNIPSVTDHNLDNGISSLASMPYSPPDAYSLVEQANDPYFMTKDCGNYNAIETSLGFDEKAVLQQLETQLGLSEDANDMNNINGSLQELSAADMGNCLVPRPFAWSLDEKMLRAMNLFKESVGDGILTQVWAPMKHGNDFILSTSEQPYLLDHMLAGYRDVSREFTFSAEDKPGSFPGLPGRVFMSQIPEWTSNVGYYNKSEYLRVEHAINHEVRGSIAVPIIDTLAEPPCCAVLELVTTKEKPDFDKELEIVSSALQLVNLRTTTSPRLMSQCLSNNKRAALTEIIDVLRAVCHAHSLPLALTWIPCYYSEGIGDEASRIRIKDGGKIPGEKTVLCIEESACYINDIVVGGFVHACVEHYLEEGQGVAGKALQLNRPFFYSDVKAYNISEYPLVHHARKYKLNAAVAVRLRSIHTNDDDYMIEFFLPVNMNGSQEQQLLLDNLSGTMQRMCQSLRTVSDAKLYGIEGSQVQFSKEEGSSFCSMSRGNSHMAPDGDHDSVQPMSVTNNETEAAHNQAMDGSRKQIEKKKSPVEKNVSLSVLQQYFSGSLKDAAKSLGVCPTTLKRICRQHGIARWPSRKINKVNHSLKKIQTVLDSVQGVEGGLKFDPYKGGFMPGGSSNQEINAHKSSLFWKKCSGKFPDPASKDAVTVSPASGSKDSKPIAMDDGGLRQEPFRVSILESSRCDIAYHSPNTLGEHHNPTTSSMSDSSNGSGSRKFEWLSEI

SEQ ID NO: 279 - protein, 769 aa, Arachis ipaensis
MTKDCGNYNAIETSLGFDEKAVLQQLETQLGLSEDANDMNNINGSLQELSAADMGNCLVPRPFAWSLDEKMLRAMNLFKESVGDGILTQVWAPMKHGNDFILSTSEQPYLLDHMLAGYRDVSREFTFSAEDKPGSFPGLPGRVFMSQIPEWTSNVGYYNKSEYLRVEHAINHEVRGSIAVPIIDTLAEPPCCAVLELVTTKEKPDFDKELEIVSSALQLVNLRTTTSPRLMSQCLSNNKRAALTEIIDVLRAVCHAHSLPLALTWIPCYYSEGIGDEASRIRIKDGGKIPGEKTVLCIEESACYINDIVVGGFVHACVEHYLEEGQGVAGKALQLNRPFFYSDVKAYNISEYPLVHHARKYKLNAAVAVRLRSIHTNDDDYMIEFFLPVNMNGSQEQQLLLDNLSGTMQRMCQSLRTVSDAKLYGIEGSQVQFSKEEGSHMAPDGDHDSVQPMSVTNNETEAAHNQAMDGSRKQIEKKKSPVEKNVSLSVLQQYFSGSLKDAAKSLGVCPTTLKRICRQHGIARWPSRKINKVNHSLKKIQTVLDSVQGVEGGLKFDPYKGGFMPGGSSNQEINAHKSSLFWKKCSGKFPDPASKDAVTVSPASGSKDSKPIAMDDGGLRQEPFRVSILESSRCDIAYHSPNTLGEHHNPTTSSMSDSSNGSGSRKFENRKHLKAKSPCLDKGSKIIVKAAYKEDMIRFKFDPAAGCLQLYEQVATRFKLQIGSFQLKYLDDEEKWVMMVNDSDLEEFIEISDDLRTRAVKFLVSDLVV

SEQ ID NO: 280 - protein, 671 aa, Arachis ipaensis
MAKRAISMGDNHCFWKTSKFRAIHSSKPADISVTKLKSTKAFVYTALFYFAISETIEIICSNLLNAIYTHTCTSIYSGKSFDLFLQLVNLRTTTPPRLMSQCLSNNKRAALTEIIDVSRAVCRAHSLPLALTWIPCYYSEGIGDEASRIRIKDGCKIPGEKTVLCIEESACYINDIVVGGFVRACVEHYLEEGQGVAGKALQSNRPFFYSDVKAYNISEYPLVHHARKYKLNAAVAVRLRSIHTNDDDYIIEFFLPVIMNGSQEQQLLLDNLSDTMQRMCQSLRIVSDDELYGIEGSQVQFSKEEGSSFFSMSRGNSHMAPEGDHDSVQPMSLTNNETEAAHNQAMDGSRKQTEKKKSTVEKNVSLSVLQQYFSGSLKDAAKSLGVCPTTLKRICRQHGIARWPSRKINKVNRSLKKIQTVLDSVQGVEGGLKFDPYKGGFIPGGSSNQEINAHKSSLFRKKCSGKYPDPASKDAVTVSPASGSKDSKPIGMDDGGLRQEPFPVSILESSRCDIVYHSPNTLVADEMENYLNGADKLGEHHNPTTSSMSDSSNGSGSRKFENRKHLKAKSPCVDKGSKIIVKAAYKEDMIRFKFDPAAGCLQLYEQVATRFKLQIGSFQLKYLDDEEEWVRMVNDSDLEECIEILDDLGTRAVKFLVSDMPSGLSSSGSNS

SEQ ID NO: 281 - protein, 585 aa, Arachis ipaensis
MSQCLSNNKRAALTEIIDVLRAVCRAHSLPLALTWIPCYYSEGIGDEASRIRTKDGRKIPGEKTVLCIEESACYTNDIVVGGFVRACVEHYLEEGQGVAGKALQSNRPFFYPDVKAYNISEYPLVHHARKYKLNAAVAIRLRSIHTNDDDYIIEFFLPVNMNGSEEQQLLLDNLAGTMQRKCQTLRKVSDAELHGIEGSSFCSMSRGNSHMAPDGDHDSVQPMSVTNNETEAAHNQAMEGSRKQIEKKRSPVKKNFSLSVLQQYFSGNLKDAAKSLGVCPTTLKRICRQHGIARWPSRKINKVNRSLKKIQTVLDSGVEGGLKFDPYKGGFMSGGSSNQEINAHKSSLFRKKCSVKYPDPASGSKGENLAVNQLLHSDILISNSKGELKKNKAFSVDVDSKPIAMGDGGLRQEPFPVSILESSRCDVAYHSPNSLVADEMETYLNGADKLGEHHNPTTSSMTDSSSGSCSILRPSSSGSPKFENRKHLKAKSPCVRRGSKIIVKAAYGENIIRFKFDPAAGCLQLYEEVATRFKLQIGSFQLEYLDDEDEWVRMVTDTDLEECIEMFDDLGTAVKFLVREPCSNS

SEQ ID NO: 282 - protein, 918 aa, Cajanus cajan
MEYPFSPKGGGIGDWQSSRAQLEGSTSLDGGMRNSISEDMPNSFSELMNFDTYAGLCDSPSITDQILANELPSFASLPYPLPDGFNLVQQNSGQCYMSRVGKNNNDMESSPMYGEKVGCQQMDTLLGFFSNSNDGNNLNSKLKTNGSSQHSNAFDTGNYIMSRPPGLSLDERMLRALSFFKESAGGGILAQVWVPIKHGDQFILSTSEQPYLLDQMLAGYREVSRTFTFSAEGKSGCFLGLPGRVFTSKVPEWTSDVGYYSMSEYLRFEHAINHKVRGSIAFPIFDMHSELPCCAVLELVTTKEKADFDKELEIVCRALQLVNLRTTKPLRLLPECLSNNKKATLTEIVDVLRSVCHAHRLPLALTWIPCYTEGSRGEATRIQIKEGHSTSSEKGILCIEESACYITDRAMTGFVRACMEHHLEEGKGVAGKALQSNHPFFYPDVKTYDISEYPLVHHARKYNLNAAVAIRLRSTYTNDDDYILEFFLPANMRGSSEQQLLLDNLSGTMQRICRSLRTVSDVELSGIGSSQVGFGKKNVPSFFPLSSRNSQIPLINGDRDSSQKMSLKATNLGNNEIEPSPSQERNGSKRQVQKNRSTLEKNVSLSVLQQYFSGSLKDAAKHIGVCPTTLKRICRQHGISRWPSRKINKVNRSLKKIQTVLNSVQGVEGGLKFDPSVGAFVAGGSIIQEIDAHKSLMFPEKNTIKDCAPDTLEAVSVPTAPCSEDENFSIKQQAFAPRCKIVLNKLVWVSRYLIGDEMDIGVDGDDGVVEPNHPTSSSLTDSSNGSGSMMHSNSSGSESFQNQNQSKVKSTIVDSGSILIVKATYGEDTIRFKFDPSAGCFRLYEEVATRFKLQNGSFQLKYLDDEEEWVMLVNDADLQECIEILDDIGTRSVRFLVRDMPCVLGSSGSSNGYLGGSL

SEQ ID NO: 283 - protein, 932 aa, Cajanus cajan
MEDHFPPKGKEIGYCTSPGVQLEESTSVDGGTKNSVSDDMFSYFSELMNFDTYAGWSNSPSLTDQSLANVFSSFSSPPDGLNLVEHSNGPFFMTEVGEIHNDMESSPSCEERVIFHQMDIQLGFLDDANNLDSKQNHNGTSQKINTSDMCNYIISRSSGRSLNDRMLRALSSFMESADAGMLAQVWLPIKHGDEFILSTSEQPYLLDPKLAGYREVSRAFTFSAEGKPGSCPGLPARVFISHVPEWTSNVGYYNKTEYLRLEHAMNHEIRGSIALPISDENSQVPCAVLELVTTKEKPNFDRELEIVTHALQFLKKYVIYIQQSDQHRTNDKCPCDDFMQLVNLRTTTPPRLLPQCLSSNKRSALTEIIDVLRAVCHAHRLPLALTWIPCCYREGTGDETERIRIKEGRTSSNEKCVLCIEESACYVNDGAVRGFVHACVEHHLVEGQGIAGKALQSNHPFFYTDVKTYDIVEYPLVHHARKYNLNAAVAIRLRSTYTNDDDYILEFFLPVNMTGSSEQQLLLDNLSGTMRRICRTLRTVSDAELTGIEGSQGGFPREKVSGIFPLSRRNSQITFINDDHDSVQKMSLKVSNLKNNGIEAAHSQEMNGSRKQIEKKRCTVEKNVSLSVLQQYFSGSLKDAAKSIGVCPTTLKRICRQHGISRWPSRKINKVNRSLKKIQTVLDSVQGVEGGLKFDPYTGGFIAGGSIMQETESHKYLLFPEKSSVKDPKPATQKKISVVSAPGSTSENSAIKLDGNDVGLVGNHLVHSRSVLISSTNRVEGADEHNHPTSSRTTDSSNGSGSIMHGSSSCSQSFENHKHSKVKSTCVDSGSKIIVKAGYRGDTIRFKFDPSAGCFKLYEEVATRFKLQNGSFQLKYLDDEEEWVMLVNDSDLQECTEIMDDIGTRCVKFLVRDVPCVLSSRDSNSCFLSDSS

SEQ ID NO: 284 - protein, 960 aa, Cajanus cajan
MEDHFPPKGKEIGYCTSPGVQLEESTSVDGGTKNSVSDDMFSYFSELMNFDTYAGWSNSPSLTDQSLANVFSSFSSPPDGLNLVEHSNGPFFMTEVGEIHNDMESSPSCEERVIFHQMDIQLGFLDDANNLDSKQNHNGTSQKINTSDMCNYIISRSSGRSLNDRMLRALSSFMESADAGMLAQVWLPIKHGDEFILSTSEQPYLLDPKLAGYREVSRAFTFSAEGKPGSCPGLPARVFISHVPEWTSNVGYYNKTEYLRLEHAMNHEIRGSIALPISDENSQVPCAVLELVTTKEKPNFDRELEIVTHALQLVNLRTTTPPRLLPQCLSSNKRSALTEIIDVLRAVCHAHRLPLALTWIPCCYREGTGDETERIRIKEGRTSSNEKCVLCIEESACYVNDGAVRGFVHACVEHHLVEGQGIAGKALQSNHPFFYTDVKTYDIVEYPLVHHARKYNLNAAVAIRLRSTYTNDDDYILEFFLPVNMTGSSEQQLLLDNLSGTMRRICRTLRTVSDAELTGIEGSQGGFPREKVSGIFPLSRRNSQITFINDDHDSVQKMSLKVSNLKNNGIEAAHSQEMNGSRKQIEKKRCTVEKNVSLSVLQQYFSGSLKDAAKSIGVCPTTLKRICRQHGISRWPSRKINKVNRSLKKIQTVLDSVQGVEGGLKFDPYTGGFIAGGSIMQETESHKYLLFPEKSSVKDPKPATQKKISVVSAPGSTSENSAIKLDGNDVGLVGNHLVHSRSVLISSTSEEELKKNNAYSDDSKSMAMNDDGSCKKACHWTNTQDCPEQTCSISLVSDEVEVGADRVEGADEHNHPTSSRTTDSSNGSGSIMHGSSSCSQSFENHKHSKVKSTCVDSGSKIIVKAGYRGDTIRFKFDPSAGCFKLYEEVATRFKLQNGSFQLKYLDDEEEWVMLVNDSDLQECTEIMDDIGTRCVKFLVRDVPCVLSSRDSNSCFLSDSS

SEQ ID NO: 285 - protein, 974 aa, Cajanus cajan
MEYPFSPKGGGIGDWQSSRAQLEGSTSLDGGMRNSISEDMPNSFSELMNFDTYAGLCDSPSITDQILANELPSFASLPYPLPDGFNLVQQNSGQCYMSRVGKNNNDMESSPMYGEKVGCQQMDTLLGFFSNSNDGNNLNSKLKTNGSSQHSNAFDTGNYIMSRPPGLSLDERMLRALSFFKESAGGGILAQVWVPIKHGDQFILSTSEQPYLLDQMLAGYREVSRTFTFSAEGKSGCFLGLPGRVFTSKVPEWTSDVGYYSMSEYLRFEHAINHKVRGSIAFPIFDMHSELPCCAVLELVTTKEKADFDKELEIVCRALQLVNLRTTKPLRLLPECLSNNKKATLTEIVDVLRSVCHAHRLPLALTWIPCYTEGSRGEATRIQIKEGHSTSSEKGILCIEESACYITDRAMTGFVRACMEHHLEEGKGVAGKALQSNHPFFYPDVKTYDISEYPLVHHARKYNLNAAVAIRLRSTYTNDDDYILEFFLPANMRGSSEQQLLLDNLSGTMQRICRSLRTVSDVELSGIGSSQVGFGKKNVPSFFPLSSRNSQIPLINGDRDSSQKMSLKATNLGNNEIEPSPSQERNGSKRQVQKNRSTLEKNVSLSVLQQYFSGSLKDAAKHIGVCPTTLKRICRQHGISRWPSRKINKVNRSLKKIQTVLNSVQGVEGGLKFDPSVGAFVAGGSIIQEIDAHKSLMFPEKNTIKDCAPDTLEAVSVPTAPCSEDENFSIKLEGKLKNAVDCSEDSKSMAMDDGSGQTASLCTKVQDCAEQACLGSFLAKERDERIPNKGGLRVEKFKHNIVGPSSRYLIGDEMDIGVDGDDGVVEPNHPTSSSLTDSSNGSGSMMHSNSSGSESFQNQNQSKVKSTIVDSGSILIVKATYGEDTIRFKFDPSAGCFRLYEEVATRFKLQNGSFQLKYLDDEEEWVMLVNDADLQECIEILDDIGTRSVRFLVRDMPCVLGSSGSSNGYLGGSL

SEQ ID NO: 286 - protein, 962 aa, Cannabis sativa
MEPFSPKEGDNDYWSSPSEQVESFPSFDGVPRDMLSEDVFNSFSELLSFDTYVGWSSNPAVTDQVSATYGLASLPPTIYTPQNTSDFIEQTVEALPVAEVGGNLDLPRGSFNYGDKAVFLPEDTQLEASAHSNNGSDLVATQNTDFLENGEMDVENSTVPRPVRLSLDEKMLKALSFVKASSGMGILAQVWVPVRRGDELLLSTSDQPYLLDNMLVGYREVSRRFTFSVEGKQGCVLGLPGRVFQSKIPEWTSNVAYYKKNEYVRVEHAYNHQVRGCIALPVCEPDLGVTCCAVLEIVTTNEKPNFDAEIEIVCNALQAVNLKMSQPLRLNPQCLSKNQKDALAEIIDVLRAVCHAHRLPLALTWIPCNSEGTSNEVAGVCVGDGKTSSTEKCILCVEKAACYVNDRLMQGFASACVEHHLEVGQGLAGKALQSNLPFFFPDVKTYDISDYPLVHHARKFGLNAAVAIRLRSTYTGDCDYILEFFLPVNMKGASEQQLLLNNLSGTMQRICKSLRTVSDVEIGIASHDTFKEDSVPNFIPLPGESSNMVQLDGDLNSTNEVPLKLAERRNEAHKVDNVHEQPRGTRWQAEKKRSTAEKNVSLSVLQQYFSGSLKDAAKSIGVCPTTLKRICRQHGISRWPSRKINKVNRSLKKIQTVLDSVQGVEGGLKFDPTTGGLVAAGSISQEYESQKKIASLQNLDPSFTVKLEEDECYTDGVNLNSYKIRKPNIIAPTNSNKDSKIAIEAGSKPISGTFSEKISLGSYPATEGMTSSHSKCSSKFENSDARHVSRNSSSLAVGDEMDTSEDGEDDELLQHNQPASSSMTDSSNGCGSLLHGSSSSSQSFEERKHPKGKASCADSYSKIIVKATYKEDTVRFKFDTSAGCYQLYEEVAKRFKLHTGAFQLKYLDDEEEWVMLVSDMDLQECLEILDDVGTRSVKFQVRDMPCVVGSSGSSNCFLPGGT

SEQ ID NO: 287 - protein, 941 aa, Cicer arietinum
MEYPFYHTGKGIGYWQSPGTQLEGSTSLDGGISNLVSEDMPSSFSELMNFDNYAGLCSGPSMTDQIMANELPALASVLYQSSDGLNIVEQNSGQFYMTEVGGNSNNPQSSPIYGEKIVCQQMDTLLGFLDNNDANNLSSKQKINGSLQHVNTFDTGNCVIPKPPALSLDERMLKALSFFKESAGGGILAQVWVPIKHGGQVFLSTSEQPYLLDQMLAGYREVSRTFTFSAEGKPGCLPGLPGRVFISKVPEWTSNVGYYNPSEYLRVEHARNHEVRGSIAFPIFDMHSGLPCCAVLELVTTKEKPNFDKELEIICRSLQLVNLRTNVPFRLLPECLSSNKRAALTEIVDVLRSVCHAHRLPLALTWIPCFYTKGTRDETTRIQIKEGNSSSREKNILCIEESACYITDRVMEGFVHACVEHHLEEGKGVAGKALQSNHPFFYPDVKAYDISEYPLVHHARKYSLNASVAIRLRSTYTYNDDYILEFFLPINMKGSSEQQLLLDSLSGTMQRICTSLRTVSEAELSGIKSLQVGFEKKNDPRFPPLSTQNSQIPSIKENNGSVQKLSLKASNQRKNGNEPSCNQETNGPRRRVEKNKSTSEKNVSLSVLQQYFSGSLKDAAKSIGVCPTTLKRICRHHGILRWPSRKINKVNRSLKKIQTVLDSVQGVEGGLKFDPSMGAFVAGGSTIQEIDEHESLFFPEKSTAQDPQNLENKLEGKLKETNSSSVDCSEDSKSMAMDDCHEQACFGSVLGKSDKLVLNKGGLRIEKCKHNNTSSFFVDEMDTCVDGDDEVVEHNNPTSSSLTDSSNGSGSMIHDISSGYEDFENQKHCKGKSTIVDGGSKIVVKATYGEDTIRFKFDPSTGCFRLYEEVAARFKLQNGTFRLKYLDDEEEWVMLVNDSDLQECLEILNDMGTRNARFLVRDVPCVLSSSGSSNCYLGGSS

SEQ ID NO: 288 - protein, 938 aa, Cicer arietinum
MEDQFSSTEKGIGFWTPLDVGMKSSTTSEDMFNNISELMNFDTYAGWCNGSSSVNDHDHSLVHEFSSFASIPYSPHDGLNLVEHINGPFFMTEIGGGNYNDMDNSTSYGGNYQLEFLDTNNSNETNNSDSQQGQNGSFQLLNSNNSSDMCNYLIPKSPSWSLDERMMSALSFFKESAGEGILAQVWVPVKYGDEFILTTSDQPYLLDQKLAGYREVSRLFTFSAEMKMGSCPGLPGRVFISHVPEWTSNVGYYHKSEYLRLEHAISHDVRGSIALPISDMLSEVSCSAVLELVTTKEKLNFDKELEFVSHALQRVNLRTIMPPRLLPQCVSINKRAALTEIIDVLRAVCHAHRLPLALTWIPCCYSEGKGEESERIRIKEGHTSSDEKCVLCIEESACYINDKMVGGFVHACADHHLEEGQGISGKALQSNHPFFYTDVKAYDVSEYPLVHHARKYSLNAAVAIRLRSTYTNDDDYVLEFFLPINMTGSSEQQLLLDNLSDTMRRICKSLRTVSEAELRGIQGSQDGFQKENVSGFFSLSRGNSQIAFTTGDQDLFQMSLNATNLKNIQGHCQATNAPRKQIEKKRSAVEKNVSLSVLQQYFSGSLKDAAKRIGVCPTTLKRICRQHGISRWPSRKINKVNRSLKKIQTVLDSVQGVEGVLKFDPHTGGFVAGGSIIQQIGSHKSLMFPENFFAQDLAPAPITTREPISVTPPPCENSAIKLEDGLKKENASSVDCIQDSTSITMHDEPCQTSWIWTKTQDCPKQTSIGSVFEKQDDQCGLNKTSSFSLIEHELGGDENNQPTSSSMTDSSNASGSMVRRSSSGSQQSFENRKRSKMKSVCVDSESKFAVKANYKGDTIRFKFDPSVGCFRLYEEVTTRFKLQNGSFTLKYLDDEEEWVMLVNDSDLKECVEILSDVGTHCVKLLVRDIHGSIVTSNS

SEQ ID NO: 289 - protein, 1007 aa, Citrus clementina
MEHPFSPKEKGTGYWASPRAPMEPLDCGTRNSNSGDLFNNFSDLLNFDAYAGWCNSPSVTDQMFASYGFSSFQSTPCASFDTSNVMASNSSVASEGGGTSNAMESSFDRGDRIGFQQTSTDCYPINTNDADDLVPKQSSGVYRENNTNMSNSMICRPVPPSLDEKMLRALSFFKLSSGGGILAQVWVPRKQGDDYILSTSDQPYLLDQMLAGYREVSRKFTFSAEAKPGTFLGLPGRVFSSKVPEWTSNVAYYNEAEYARVTHAVNHAVRSCIALPVFQFPEMSCSAVLEIVSVKEKPNFDAEIENICNALQAVNLRTTAPPRLLPQNISRNQKAALAEITDVLRAVCHAHRLPLALTWIPCNYDEEAVDEVIKVRVRHSNTSSDGKSVLCIEGTACYVNDSDMQGFVHACSEHYLEEGQGVAGKALQSNHPFFFPDVKLYDITEFPLVHHARKFGLNAAVAIRLRSTYTGDDDYILEFFLPVTIKGSSEQQLLLNNLSGTMQRMCRSLRTVSDAELIQDEGSKFGFQKEVVSNFPPMVMSRRNSQSALLDSDFNSIEKITLSVSNSKSGLEADGPPEQVMSGSRRHMEKKRSTAEKNVSLSVLQQYFSGSLKDAAKSIGVCPTTLKRICRQHGISRWPSRKINKVNRSLKKIQTVLNSVQGVEGGLKFDPTTGGFVAAGSIIQEFDAQKSSLHPDKNMPVRNSESITKDSTSIPPTLSIDGEKFVVKVEEDECSVDKNQVGPLSMLIQNSSKGELNKSSVNLIDCSEDSKLILTDAGPFWQARLGTAAWDSPDTASMVSYYAKGGEKGARSKNGLQLESSDCHFVSQSSNSLAAADNMDTRREGDDGIIENNQPTTSSTTDSSNGSGSLAHASSVSSPSFEEGKHLKIHPGSDDIGSKIIVKATYKEDIIRFKFDPSAGCFQLYEEVARRLKLQNGTFQLKYLDDEEEWVMLVSDSDLQECFDILESLGKRSVRFLVRDISCNVGSSGSSNCFLAGSSSCFLAGVS

SEQ ID NO: 290 - protein, 1012 aa, Citrus clementina
MEHPFSPKEKGTGYWASPRAPMEPLDCGTRNSNSGDLFNNFSDLLNFDAYAGWCNSPSVTDQMFASYGFSSFQSTPCASFDTSNVMASNSSVASEGGGTSNAMESSFDRGDRIGFQQTSTDCYPINTNDADDLVPKQSSGVYRENNTNMSNSMICRPVPPSLDEKMLRALSFFKLSSGGGILAQVWVPRKQGDDYILSTSDQPYLLDQMLAGYREVSRKFTFSAEAKPGTFLGLPGRVFSSKVPEWTSNVAYYNEAEYARVTHAVNHAVRSCIALPVFQFPEMSCSAVLEIVSVKEKPNFDAEIENICNALQAVNLRTTAPPRLLPQVSSELNISRNQKAALAEITDVLRAVCHAHRLPLALTWIPCNYDEEAVDEVIKVRVRHSNTSSDGKSVLCIEGTACYVNDSDMQGFVHACSEHYLEEGQGVAGKALQSNHPFFFPDVKLYDITEFPLVHHARKFGLNAAVAIRLRSTYTGDDDYILEFFLPVTIKGSSEQQLLLNNLSGTMQRMCRSLRTVSDAELIQDEGSKFGFQKEVVSNFPPMVMSRRNSQSALLDSDFNSIEKITLSVSNSKSGLEADGPPEQVMSGSRRHMEKKRSTAEKNVSLSVLQQYFSGSLKDAAKSIGVCPTTLKRICRQHGISRWPSRKINKVNRSLKKIQTVLNSVQGVEGGLKFDPTTGGFVAAGSIIQEFDAQKSSLHPDKNMPVRNSESITKDSTSIPPTLSIDGEKFVVKVEEDECSVDKNQVGPLSMLIQNSSKGELNKSSVNLIDCSEDSKLILTDAGPFWQARLGTAAWDSPDTASMVSYYAKGGEKGARSKNGLQLESSDCHFVSQSSNSLAAADNMDTRREGDDGIIENNQPTTSSTTDSSNGSGSLAHASSVSSPSFEEGKHLKIHPGSDDIGSKIIVKATYKEDIIRFKFDPSAGCFQLYEEVARRLKLQNGTFQLKYLDDEEEWVMLVSDSDLQECFDILESLGKRSVRFLVRDISCNVGSSGSSNCFLAGSSSCFLAGVS

SEQ ID NO: 291 - protein, 992 aa, Citrus clementina
MEHPFSPKEKGTGYWASPRAPMEPLDCGTRNSNSGDLFNNFSDLLNFDAYAGWCNSPSVTDQMFASYGFSSFQSTPCASFDTSNVMASNSSVASEGGGTSNAMESSFDRGDRIGFQQTSTDCYPINTNDADDLVPKQSSGVYRENNTNMSNSMICRPVPPSLDEKMLRALSFFKLSSGGGILAQVWVPRKQGDDYILSTSDQPYLLDQMLAGYREVSRKFTFSAEAKPGTFLGLPGRVFSSKVPEWTSNVAYYNEAEYARVTHAVNHAVRSCIALPVFQFPEMSCSAVLEIVSVKEKPNFDAEIENICNALQNISRNQKAALAEITDVLRAVCHAHRLPLALTWIPCNYDEEAVDEVIKVRVRHSNTSSDGKSVLCIEGTACYVNDSDMQGFVHACSEHYLEEGQGVAGKALQSNHPFFFPDVKLYDITEFPLVHHARKFGLNAAVAIRLRSTYTGDDDYILEFFLPVTIKGSSEQQLLLNNLSGTMQRMCRSLRTVSDAELIQDEGSKFGFQKEVVSNFPPMVMSRRNSQSALLDSDFNSIEKITLSVSNSKSGLEADGPPEQVMSGSRRHMEKKRSTAEKNVSLSVLQQYFSGSLKDAAKSIGVCPTTLKRICRQHGISRWPSRKINKVNRSLKKIQTVLNSVQGVEGGLKFDPTTGGFVAAGSIIQEFDAQKSSLHPDKNMPVRNSESITKDSTSIPPTLSIDGEKFVVKVEEDECSVDKNQVGPLSMLIQNSSKGELNKSSVNLIDCSEDSKLILTDAGPFWQARLGTAAWDSPDTASMVSYYAKGGEKGARSKNGLQLESSDCHFVSQSSNSLAAADNMDTRREGDDGIIENNQPTTSSTTDSSNGSGSLAHASSVSSPSFEEGKHLKIHPGSDDIGSKIIVKATYKEDIIRFKFDPSAGCFQLYEEVARRLKLQNGTFQLKYLDDEEEWVMLVSDSDLQECFDILESLGKRSVRFLVRDISCNVGSSGSSNCFLAGSSSCFLAGVS

SEQ ID NO: 292 - protein, 1010 aa, Citrus sinensis
MEHPFSPKEKGTGYWASPRAPMENLAPLDCGTRSSNSGDLFNNFSDLLNFDAYAGWCNSPSVTDQMFASYGFSSFQSTPCASFDTSNVMASNSSVASEGGGTSNAMESSFDRGDRIGFQQTSTDCYPIDTNDADDLVPKQSSGVYRENNTNMSNSMICRPVPPSLDEKMLRALSFFKLSSGGGILAQVWVPRKQGDDYILSTSDQPYLLDQMLAGYREVSRKFTFSAEAKPGTFLGLPGRVFSSKVPEWTSNVAYYNEAEYARVTHAVNHAVRSCIALPVFQFPEISCSAVLEIVSVKEKPNFDAEIENICNALQAVNLRTTAPPRLLPQNISRNQKAALAEITDVLRAVCHAHRLPLALTWIPCNYDEEAVDEVIKVRVRHSNTSSDGKSVLCIEGTACYVNDSDMQGFVHACSEHYLEEGQGVAGKALQSNHPFFFPDVKLYDITEFPLVHHARKFGLNAAVAIRLRSTYTGDDDYILEFFLPVTIKGSSEQQLLLNNLSGTMQRMCRSLRTVSDAELIQDEGSKFGFQKEVVSNFPPMVMSRRNSQSALSDSDFNSIEKITLSVSNSKSGLEADGPPEQVMSGSRRPMEKKRSTAEKNVSLSVLQQYFSGSLKDAAKSIGVCPTTLKRICRQHGISRWPSRKINKVNRSLKKIQTVLNSVQGVEGGLKFDPTTGGFVAAGSIIQEFDAQKSSLHPDKNMPVRNSESITKDSTSIPPTLSIDGEKFVVKVEEDECSVDKNQVGPLSMLIQNSSKGELNKSSVNLIDCSEDSKLILTDAGPFWQARLGTAAWDSPDTASMVSYYAKGGEKGARNKNGLQLESSDCHFVSQSSNSLAAADNMDTRREGDDGIIENNQPTTSSTTDSSNGSGSLVHASSVSSPSFEEGKHLKIHPGSDDIGSKIIVKATYKEDIIRFKFDPSAGCFQLYEEVARRLKLQNGTFQLKYLDDEEEWVMLVSDSDLQECFDILESLGKRSVRFLVRDISCNVGSSGSSNCFLAGSSSCFLAGVS

SEQ ID NO: 293 - protein, 1015 aa, Citrus sinensis
MEHPFSPKEKGTGYWASPRAPMENLAPLDCGTRSSNSGDLFNNFSDLLNFDAYAGWCNSPSVTDQMFASYGFSSFQSTPCASFDTSNVMASNSSVASEGGGTSNAMESSFDRGDRIGFQQTSTDCYPIDTNDADDLVPKQSSGVYRENNTNMSNSMICRPVPPSLDEKMLRALSFFKLSSGGGILAQVWVPRKQGDDYILSTSDQPYLLDQMLAGYREVSRKFTFSAEAKPGTFLGLPGRVFSSKVPEWTSNVAYYNEAEYARVTHAVNHAVRSCIALPVFQFPEISCSAVLEIVSVKEKPNFDAEIENICNALQAVNLRTTAPPRLLPQVSSELNISRNQKAALAEITDVLRAVCHAHRLPLALTWIPCNYDEEAVDEVIKVRVRHSNTSSDGKSVLCIEGTACYVNDSDMQGFVHACSEHYLEEGQGVAGKALQSNHPFFFPDVKLYDITEFPLVHHARKFGLNAAVAIRLRSTYTGDDDYILEFFLPVTIKGSSEQQLLLNNLSGTMQRMCRSLRTVSDAELIQDEGSKFGFQKEVVSNFPPMVMSRRNSQSALSDSDFNSIEKITLSVSNSKSGLEADGPPEQVMSGSRRPMEKKRSTAEKNVSLSVLQQYFSGSLKDAAKSIGVCPTTLKRICRQHGISRWPSRKINKVNRSLKKIQTVLNSVQGVEGGLKFDPTTGGFVAAGSIIQEFDAQKSSLHPDKNMPVRNSESITKDSTSIPPTLSIDGEKFVVKVEEDECSVDKNQVGPLSMLIQNSSKGELNKSSVNLIDCSEDSKLILTDAGPFWQARLGTAAWDSPDTASMVSYYAKGGEKGARNKNGLQLESSDCHFVSQSSNSLAAADNMDTRREGDDGIIENNQPTTSSTTDSSNGSGSLVHASSVSSPSFEEGKHLKIHPGSDDIGSKIIVKATYKEDIIRFKFDPSAGCFQLYEEVARRLKLQNGTFQLKYLDDEEEWVMLVSDSDLQECFDILESLGKRSVRFLVRDISCNVGSSGSSNCFLAGSSSCFLAGVS

SEQ ID NO: 294 - protein, 1010 aa, Citrus trifoliata
MEHPFSPKEKGTGYWASPRAPMENLAPLDCGIRSSNSEDLFNNFSDLLNFDAYAGWCNSPSVTDQMFASYGFSSFQSTPCASFDTSNVMASNSSVASEGGGTSNAMGSSFDCGDRIGFQQTSTDCYPIDTNDADDLVPKQSSGVYRENNSNMSNSMICRPVPLSLDEKMLRALSFFKLSSGGGILAQVWVPRKQGDDYILSTSDQPYLLDQMLAGYREVSRKFTFSAEAKPGTFLGLPGRVFSSKVPEWTSNVAYYNEAEYARVTHAVNHAVRSCIALPVFQFPDMSCSAVLEIVSVKEKPNFDAEIENICNALQAVDLRTAAPPRLLPQNISRNQKAALAEITDVLRAVCHAHRLPLALTWIPCNYDDEAVDEVIKVRVRHSNTSSDGKSVLCIEGTACYVNDSDMQGFVHACSEHYLEEGQGVAGKALQSNHPFFFPDVKLYNITEFPLVHHARKFGLNAAVAIRLRSTYTGDDDYILEFFLPVTIKGSSEQQLLLNNLSGTMQRMCRSLRTVSDAELIQDEGSKFGFQKEVVSNFPPMVMSRRNSQSALSDSDLNSIEKITLSVSNSKSGLEADGPSEQVMSGSRRHMEKKRSTAEKNVSLSVLQQYFSGSLKDAAKSIGVCPTTLKRICRQHGISRWPSRKINKVNRSLKKIQTVLNSVQGVEGGLKFDPTTGGFVAAGSIIQEFDAQKSSLHPDKNMPVRNSESITKDSTSIPPTLSIDGEKFVVKVEEDECSVDKNQVGPLSMLIQNSSKGELNKSSVDLIDCSEDSKLILTDAGPFRQARLGTAAWDSPDTASMVSYYAKGGEKGARNKNGLQLESPDCHFVSQSSNSLAAADNMDTRREGDDGIIENNQPTTSNTTDSSNGSGSLVHASSVSSPSFEEGKHLKIHPGFDDIGSKIIVKATYKEDIIRFKFDPSAGCFQLYEEVARRLKLQNGTFQLKYLDDEEEWVMLVSDSDLQECFDILESLGKRSVRFLVRDISCNVGSSGSSNCFLAGSSNCFLAGVS

SEQ ID NO: 295 - protein, 1012 aa, Citrus unshiu
MEHPFSPKEKGTGYWASPRAPMEPLDCGTRNSNSGDLFNNFSDLLNFDAYAGWCNSPSVTDQMFTSYGFSSFQSTPCASFDTSNVMASNSSVASEGGGTSNAMESSFDRGDRIGFQQTSTDCYPINTNDADDLVPKQSSGVYQENNTNMSNSMICRPVPPSLDEKMLRALSFFKLSSGGGILAQVWVPRKQGDDYILSTSDQPYLLDQMLAGYREVSRKFTFSAEAKPGTFLGLPGRVFSSKVPEWTSNVAYYNEAEYARVTHAVNHAVRSCIALPVFQFPEMSCSAVLEIVSVKEKPNFDAEIENICNALQAVNLRTTAPPRLLPQVSSELNISRNQKAALAEITDVLRAVCHAHRLPLALTWIPCNYDEEAVDEVIKVRVRHSNTSSDGKSVLCIEGTACYVNDSDMQGFVHACSEHYLEEGQGVAGKALQSNHPFFFPDVKLYDITEFPLVHHARKFGLNAAVAIRLRSTYTGDDDYILEFFLPVTIKGSSEQQLLLNNLSGTMQRMCRSLRTVSDAELIQDEGSKFGFQKEVVSNFPPMVMSRRNSQSALLDSDFNSIEKITLSVSNSKSGLEADGPSEQVMSGSRRHMEKKRSTAEKNVSLSVLQQYFSGSLKDAAKSIGVCPTTLKRICRQHGISRWPSRKINKVNRSLKKIQTVLNSVQGVEGGLKFDPTTGGFVAAGSIIQEFDAQKSSLHPDKNMPVRNSESITKDSTSIPPTLSIDGEKFVVKVEEDECSVDKNQVGPLSMLIQNSSKGELNKSSVNLIDCSEDSKLILTDAGPFWQARLGTAAWDSPDTASMVSYYAKGGEKGARSKNGLQLESSDCHFVSQSSNSLAAADNMDTRREGDDGIIENNQPTTSSTTDSSNGSGSLAHASSVSSPSFEEGKHLKIHPGSDDIGSKIIVKATYKEDIIRFKFDPSAGCFQLYEEVARRLKLQNGTFQLKYLDDEEEWVMLVSDSDLQECFDILESLGKRSVRFLVRDISCNVGSSGSSNCFLAGSSNCFLAGVS

SEQ ID NO: 296 - protein, 986 aa, Cucumis melo
MENPFSSKEEGMVSWGPSRTQTETLTSTDVGMRILSPEDVLHSFSELMSFDSYAGWGNNCATMDQIFTSCGFSSIPPMSTCPSMEGSTFPEGVSHEAFSLNEIDGTSISVANSFTCGDKVMFQQPDTEFGVSEVSDNTHEAGAKSNDVLLDNCLISRPIGWSLDERMLRALSFFKESSSGGILAQVWVPVKHGNHFFLSTSDQPYLLDQMLTGYREVSRSYTFSAEGKSGSLLGLPGRVFTSKIPEWTSNVRYYSDSEYLRMEHAIGHEVYGSIALPVFNNELEKSCCAVLEVVTTKEKSDFDAEIDIVSRALEIVSLRTVAPPRLYPQSLKQNQKSALAEIMDVLRAVCHAHRLPLALTWIPCCITLEAVDAAARVRVKENNVSPKEKSVLCIEETACYVNEKATQGFVHACMEHHLEEGQGIAGKALLSNDPYFYPDVKTYDINKYPLVHHARKFGLNAAVAIRLRSTYTGDDDYILEFFLPVNMKGSSEQQLLLNNLSGTMQRMCRSLRTVSKEELMGARDPNTGFQSGGLIGKSATTSRRNSQSTVTDSGTRVSNSVNDGTEAEFPKKQMTNGSRRQGEKKRSTAEKNVSLSVLQQYFSGSLKDAAKSIGVCPTTLKRICRQHGILRWPSRKINKVNRSLRKIQTVLDSVKGVEGGLKFDPTTGGLMAAGSLIPEFNGQNNLLFSDNNPSIRNLEPLLQDVSSVPPVSFNGQNSAMKLEIEDSFVTMSRRISSRDILIPEKEPNVCQLDCSEGSKSTGLDAASCQLADLDMMGWEVAGNATGSIIAKKGNRLDFVENDLRSSDADCQFMAKSSCSFAAADEMGTVMEGTDGINEHYQPTTSSMTDSSNGSGLLIHGSSSSCQSVEERKHLQEKISCVDSDSKIIVKASYKDDTVRFKFDPSLGYLQLYEEVGKRFKLNQGTFQLKYLDDEKEWVMLVSNSDLQECLEVMDEIGTRNVKFLVRDITSAVGSSSSSSCFLPRVS

SEQ ID NO: 297 - protein, 988 aa, Cucumis sativus
MENPFSTKEEGTMSWGPSRTQAETLTSTDVGMRIMSPEDVLHSFSELMSFDSYAGWGNNCSTMDQIFTSCGFSSIPPMSTCPSMEGSTFPEGMSVSHEAFSLNEIDGTSISVANSFTCGDKMMFQQPDTGFGVSEVSDNTNEAGSKSNDDLLDSCLISRPIGWSLDERMLRALSLFKESSPGGILAQVWVPVKHGNQFFLSTSDQPYLLDQMLTGYREVSRSYTFSAEGKLGSLLGLPGRVFTTKIPEWTSNVRYYSKNEYLRMEHAIGHEVYGSIALPVFSNELEKSCCAVLEVVTTKEKSDFDAEIDIVSRALEIVNLRTVAPPRLYPQCLKQNQKSALAEIMDVLRAVCHAHRLPLALTWIPCCITLEAVDDAARVRVKEKIISPKEKSVLCIEETACYVNDKATQGFVHACMEHHLEEGQGLAGKALLSNYPFFYPDVKTYDINKYPLVHHARKFGLNAAVAIRLRSTYTGDDDYILEFFLPVNMKGSSEQQLLLNNLSGTMQRMCRSLRTVSKEELMGAKDPDTGFQSGLIGKSATTSRRNSQSTVTDSETRVSNSVNNGTEAECPKKQMTNGLRRQGEKKRSTAEKNVSLSVLQQYFSGSLKDAAKSIGVCPTTLKRICRQHGILRWPSRKINKVNRSLRKIQTVLDSVKGVEGGLKFDPTTGGLMAAGSLIPELNGQNNLLFSDNNTSIRNLEPFLQDVNSVPPISFNGQNSAMKLEMEDSFVTMPQRISSRNILIPEKEPNVCQLDCSEGSKSTGLDAASCQLADLDMMGGWEVAGNATGSIIAKKSNRLDFVENDLRSSDADCQFMAKSSCSFAAADEMGTVLEGTDGINEHYQPTTSSMTDSSNGSGLLIHGSSSSCQSVEERKHLQEKISCVDSDSKIVVKASYKDDTVRFKFDPSLGYLQLYEEVGKRFKLNHGTFQLKYLDDEKEWVMLVSNSDLQECLEVMDEIGTRNVKFLVRDITSAVGSSGSSSCFLPRGS

SEQ ID NO: 298 - protein, 973 aa, Cucurbita maxima
MEKPFSSKEEGMMGYWGPSRTHAETMNSTDAGMRILSPEDVLPSFSDMMNFDSYAAIDQIFTSCGFSSIPQMSTCGSIEGLSFVEGGCHEGFPLNEHGGSSISMANSFTCGDKVMFHLPDTEFGVSNVSDNANKVDSKSNDVPVDMDSCLISRPFGWSLDEKMLRVLSMFKESSPGGILAQVWVPVKRRDQFFLSTSEQPYLLDQMLTGYREVSRSFTFSAEGKLGSLLGLPGRVFTSKLPEWTSNVRYYSDHEYLRMQHAIGHDVYGSIALPVFNNEVEKSCCAVLEVVTTKEKPNFDAEIDIVSQALETVSLSTVPPPRLYSQCLKKNQRAALAEIVDVLRAVCHAHRLPLALTWIPCCYSLDAVDEVARVRVKENNINPEEKFVLCIEETACYVNDKSTQGFVHACLEHHLEEGQGIAGKALQSNHPFFYPDVKAYDINKYPLVHHARKFGLNAAVAIRLRSMYTGNDDYILEFFLPVNMKGAAEQQLLLNNLSVTMQRMCRSLRTVSKEELIGAEDSVVDFQSGLIGKSTTTSMRNSQSTVTDRETRVSNSINNGAEAECPEKQMTDGSRKQGEKKRSTSEKNVSLSVLQQYFSGSLKDAAKSIGVCPTTLKRICRQHGILRWPSRKINKVNRSLRKIQTVLDSVKGVEGGLKFDPTTGCLMAGSLIPEFNAQNSLLFSDNNPAIPNLDPFLHDVNSVPSAPFNTQNSAIKLEMDESSVSISQRTSSRSVLIPEKEPNVRQRDCSEGLESAGVDAASCQLADLDMMSWDVQGNASVSIAAKKSDRLDFVKNDLRSGDADCQFMAKSLISFAAADEVGTVLNEHYQPTTSSMTDSSNGSGLMIHGSSSSSQSVERKHLPEKVGSVDSESKIIVKASYKDDTVRFKFDPCLGYLQLYEEVGMRFKLNQGTFQLKYLDDEKEWVMLVSNSDLQECLEVMDEIGTRNVKFLVREIACAVGSSGSSSCFLSGCS

SEQ ID NO: 299 - protein, 969 aa, Cucurbita maxima
MENPFPSKEEGMGYWGPSRTQADALTFTDAGMRIPSPEDVLHSISELMSFDSYAGWGNNCAVMDPVFTSCGISSIPPTSTCPSMEGSTFPEGGSHEILTLNELGGASISVVNSFTCGDEVMFQQPDTEFGVSDVSDNTNESGSNSNNVQDMDSCLISRPIGWSLDERMLRALSLFKESSPGGILAQVWVPMKHGNQFFLSTTDQPYLLDQMLTGYREVSRWYTFSAEGKLGSLLGLPGRVFNSKIPEWTSNVRYYSDAEYLRMEHAIGHEVYGSIALPIFSNELERSCCAVLEVVTTKEKPNFDAEIDIVSRALEIVSLRTIAPPRLYPQCLKQNQRSVLAEITDVLRAVCHAHRLPLALTWIPCCYTMQAVDEAARVRVKENDVSPKGKSVLCIEETACYVNDKATQGFVHACTEHHLEEGQGIVGKALQSNHPFFYPDVKAYNINEYPLVHHARKFGLNAAVAIRLRSTYTGADDYILEFFLPVNMKGSSEQQLLLNNLSGTMQRMCRSLRTVSKDELLGAKDPDAGFQSGMVGKSATTSRRNSQSTVTDSETRVSNSINDGTKAECPKKQQTTNGTRRQADKKRSTAEKNVSFSVLQQYFSGSLKDAAKSIGVCPTTLKRICRQHGILRWPSRKINKVNRSLGKIQTVLDSVKGVECRLKFDPTTGGLMAAGSLIPELNGQNSPLFSDNNPSIINLKPLPRDVNSVPSIPFDSQNPTVKLEMDDQRNSSRSVLIPEKEPSVCQLDCGEGSKSTGLDAASCQLSGLDVMDWDVPGNAAGCITAKKGNGLDFVENNLRSCSFGAANGVGTMWEGSDGMNEHYQPTTSSMTDSSNGSGLLIHGSSSSGQSVEERKHLQEKTSCVDSDSKIVVKASYKEDTVRFKFDPSLGYLQLYEEVGKRFKLNQGTFQLKYLDDEKEWVMLVSNSDMQECLEVMDEIGTRNVKFLVRDITCAVGSSGSSSCYLSGGS

SEQ ID NO: 300 - protein, 968 aa, Cucurbita maxima
MENPFPSKEEGMGYWGPSRTQADALTFTDAGMRIPSPEDVLHSISELMSFDSYAGWGNNCAVMDPVFTSCGISSIPPTSTCPSMEGSTFPEGGSHEILTLNELGGASISVVNSFTCGDEVMFQQPDTEFGVSDVSDNTNESGSNSNNVQDMDSCLISRPIGWSLDERMLRALSLFKESSPGGILAQVWVPMKHGNQFFLSTTDQPYLLDQMLTGYREVSRWYTFSAEGKLGSLLGLPGRVFNSKIPEWTSNVRYYSDAEYLRMEHAIGHEVYGSIALPIFSNELERSCCAVLEVVTTKEKPNFDAEIDIVSRALEIVSLRTIAPPRLYPQCLKQNQRSVLAEITDVLRAVCHAHRLPLALTWIPCCYTMQAVDEAARVRVKENDVSPKGKSVLCIEETACYVNDKATQGFVHACTEHHLEEGQGIVGKALQSNHPFFYPDVKAYNINEYPLVHHARKFGLNAAVAIRLRSTYTGADDYILEFFLPVNMKGSSEQQLLLNNLSGTMQRMCRSLRTVSKDELLGAKDPDAGFQSGMVGKSATTSRRNSQSTVTDSETRVSNSINDGTKAECPKKQTTNGTRRQADKKRSTAEKNVSFSVLQQYFSGSLKDAAKSIGVCPTTLKRICRQHGILRWPSRKINKVNRSLGKIQTVLDSVKGVECRLKFDPTTGGLMAAGSLIPELNGQNSPLFSDNNPSIINLKPLPRDVNSVPSIPFDSQNPTVKLEMDDQRNSSRSVLIPEKEPSVCQLDCGEGSKSTGLDAASCQLSGLDVMDWDVPGNAAGCITAKKGNGLDFVENNLRSCSFGAANGVGTMWEGSDGMNEHYQPTTSSMTDSSNGSGLLIHGSSSSGQSVEERKHLQEKTSCVDSDSKIVVKASYKEDTVRFKFDPSLGYLQLYEEVGKRFKLNQGTFQLKYLDDEKEWVMLVSNSDMQECLEVMDEIGTRNVKFLVRDITCAVGSSGSSSCYLSGGS

SEQ ID NO: 301 - protein, 923 aa, Cucurbita maxima
MATNLSISGWGNNCAVMDPVFTSCGISSIPPTSTCPSMEGSTFPEGGSHEILTLNELGGASISVVNSFTCGDEVMFQQPDTEFGVSDVSDNTNESGSNSNNVQDMDSCLISRPIGWSLDERMLRALSLFKESSPGGILAQVWVPMKHGNQFFLSTTDQPYLLDQMLTGYREVSRWYTFSAEGKLGSLLGLPGRVFNSKIPEWTSNVRYYSDAEYLRMEHAIGHEVYGSIALPIFSNELERSCCAVLEVVTTKEKPNFDAEIDIVSRALEIVSLRTIAPPRLYPQCLKQNQRSVLAEITDVLRAVCHAHRLPLALTWIPCCYTMQAVDEAARVRVKENDVSPKGKSVLCIEETACYVNDKATQGFVHACTEHHLEEGQGIVGKALQSNHPFFYPDVKAYNINEYPLVHHARKFGLNAAVAIRLRSTYTGADDYILEFFLPVNMKGSSEQQLLLNNLSGTMQRMCRSLRTVSKDELLGAKDPDAGFQSGMVGKSATTSRRNSQSTVTDSETRVSNSINDGTKAECPKKQQTTNGTRRQADKKRSTAEKNVSFSVLQQYFSGSLKDAAKSIGVCPTTLKRICRQHGILRWPSRKINKVNRSLGKIQTVLDSVKGVECRLKFDPTTGGLMAAGSLIPELNGQNSPLFSDNNPSIINLKPLPRDVNSVPSIPFDSQNPTVKLEMDDQRNSSRSVLIPEKEPSVCQLDCGEGSKSTGLDAASCQLSGLDVMDWDVPGNAAGCITAKKGNGLDFVENNLRSCSFGAANGVGTMWEGSDGMNEHYQPTTSSMTDSSNGSGLLIHGSSSSGQSVEERKHLQEKTSCVDSDSKIVVKASYKEDTVRFKFDPSLGYLQLYEEVGKRFKLNQGTFQLKYLDDEKEWVMLVSNSDMQECLEVMDEIGTRNVKFLVRDITCAVGSSGSSSCYLSGGS

SEQ ID NO: 302 - protein, 967 aa, Cucurbita moschata
MENPFSSKEEGMMGYWGPSRTQAETMNSTDAGMRILSPEDVLPTFSDMMNFDSYAAIDQIFTSCGFSSMPQMSTCGSIEGLSFVEGGCHEGFPLNEHGGASISMANSFTCGDKVMFQLPDTEFGVSSISDNANKVDSKSNDVPVDMDSCLISRPFGWSLDEKMLRVLSMFKESSPGGILAQVWVPVKHGDQFFLSTSEQPYLLDQMLTGYREVSRSFRFSAEGKLGSLLGLPGRVFTSKLPEWTSNVRYYSDHEYLRMQHAIGHDVYGSIALPVFNNEVEKSCCAVLEVVTTKEKPNFDAEIDIVSQALETVSLSTVPPPRLYSQCLKKNQRAALAEIVDVLRAVCHAHRLPLALTWIPCCYSFDAVDEVARVRVKENNINPEEKFVLCIEETACYVNDKSTQGFVHACLEHHLEEGQGIAGKALQSNHPFFYPDVKAYDINKYPLVHHARKFGLNAAVAIRLRSMYTGNDDYILEFFLPVNMKGAAEQQLLLNNLSVTMQRMCRSLRTVSKEELIGAEDSVVDFQSGFTSMRNSQSTVTDSETRVSNSINNGAEAECPEKQMTDGSRKQGEKKRSTSEKNVSLSVLQQYFSGSLKDAAKSIGVCPTTLKRICRQHGILRWPSRKINKVNRSLRKIQTVLDSVKGVEGGLKFDPTTGCLMAGSLIPELNAQNSLLFSDNNPAIPNLDPFLHDVNSVPSAPFNTQNSAIKLEMDESSVSISQRTSSRSVLIPEKEPNVRHRDCSEGLEAAGVDAASCQLADLDMVGWDVQGNASASIAAKKSDRLDFVKNDLRSGDADCQFMAKSSISFAAADEVGTVLNEHYQPTTSSMTDSSNGSGLMIHGSSSSSQSVERKHLPEKVGSVDSESKIIVKASYKDDTVRFKFDPCLGYLQLYEEVGTRFKLNQGTFQLKYLDDEKEWVMLVSNSDLQECLEVMDEIGTRNVKFLVRDIACAVGSSGSSSCFLSGCS

SEQ ID NO: 303 - protein, 969 aa, Cucurbita moschata
MENPFPSKEEGMGYWGPSRTQADALTFTDAGMRIPSPEDVLHSISELMSFDTYAGWGNNCAVMDPVFTSCGISSIPPTSTCPSMEGSTFPEGGSHEILPLNELGGASISMANSFTCGDEVTFQQPDTEFGVSDVSDNTNESGSNSNNVQDMDSCLISRPLGWSLDERMLRALSLFKESSPGGILAQVWVPMKHGNQFYLSTTDQPYLLDQMLTGYREVSRWYTFSAEGKLGSLLGLPGRVFNSKIPEWTSNVRYYSDAEYLRMEHAIGHEVYGSIALPIFSNELERSCCAVLEVVTTKEKPNFDAEIDIVSRALEIVSLRTIAPPRLYPQCLKQNQRSVLAEITDVLRAVCHAHRLPLALTWIPCCYTLQAVDEAARVRVKENDVSPKGKSVLCIEETACYVNDKATQGFVHACMEHHLEEGQGIVGKALQSNHPFFYPDVKAYNINEYPLVHHARKFGLNAAVAIRLRSTYTGADDYILEFFLPVNMKGSSEQQLLLNNLSGTMQRMCRSLRTVSKDELLGAKDPDAGFQSGMVGKSATTSRRNSQSTVTDSETRVSNSINDGTKAECPKKQQTTNGTRRQADKKRSTAEKNVSFSVLQQYFSGSLKDAAKSIGVCPTTLKRICRQHGILRWPSRKINKVNRSLGKIQTVLDSVKGVECRLKFDPTTGGLMAAGSLIPELNGQNSPLFSDNNPSIINLEPLPRDVNSVPPIPFDSQNPPVKLEMDDQRNSSRSLLIPEKEPSVCQLDCSEGSKSTGLDAASCQLSGLDVMDWDVPGNAAGSVTARKGNGLDFVENNLRSCSFGAANGVGTMWEGSDGMNEHYQPTTSSMTDSSNGSGLLIHGSSSSGQSVEERKHLQEKTSCVDSDSKIVVKASYKEDTVRFKFDPSLGYLQLYEEVGKRFKLNQGTFQLKYLDDEKEWVMLVSNSDMQECLEVMDEIGTRNVKFLVRDITCAVGSSGSSSCYLSGGS

SEQ ID NO: 304 - protein, 968 aa, Cucurbita moschata
MENPFPSKEEGMGYWGPSRTQADALTFTDAGMRIPSPEDVLHSISELMSFDTYAGWGNNCAVMDPVFTSCGISSIPPTSTCPSMEGSTFPEGGSHEILPLNELGGASISMANSFTCGDEVTFQQPDTEFGVSDVSDNTNESGSNSNNVQDMDSCLISRPLGWSLDERMLRALSLFKESSPGGILAQVWVPMKHGNQFYLSTTDQPYLLDQMLTGYREVSRWYTFSAEGKLGSLLGLPGRVFNSKIPEWTSNVRYYSDAEYLRMEHAIGHEVYGSIALPIFSNELERSCCAVLEVVTTKEKPNFDAEIDIVSRALEIVSLRTIAPPRLYPQCLKQNQRSVLAEITDVLRAVCHAHRLPLALTWIPCCYTLQAVDEAARVRVKENDVSPKGKSVLCIEETACYVNDKATQGFVHACMEHHLEEGQGIVGKALQSNHPFFYPDVKAYNINEYPLVHHARKFGLNAAVAIRLRSTYTGADDYILEFFLPVNMKGSSEQQLLLNNLSGTMQRMCRSLRTVSKDELLGAKDPDAGFQSGMVGKSATTSRRNSQSTVTDSETRVSNSINDGTKAECPKKQTTNGTRRQADKKRSTAEKNVSFSVLQQYFSGSLKDAAKSIGVCPTTLKRICRQHGILRWPSRKINKVNRSLGKIQTVLDSVKGVECRLKFDPTTGGLMAAGSLIPELNGQNSPLFSDNNPSIINLEPLPRDVNSVPPIPFDSQNPPVKLEMDDQRNSSRSLLIPEKEPSVCQLDCSEGSKSTGLDAASCQLSGLDVMDWDVPGNAAGSVTARKGNGLDFVENNLRSCSFGAANGVGTMWEGSDGMNEHYQPTTSSMTDSSNGSGLLIHGSSSSGQSVEERKHLQEKTSCVDSDSKIVVKASYKEDTVRFKFDPSLGYLQLYEEVGKRFKLNQGTFQLKYLDDEKEWVMLVSNSDMQECLEVMDEIGTRNVKFLVRDITCAVGSSGSSSCYLSGGS

SEQ ID NO: 305 - protein, 923 aa, Cucurbita moschata
MATNLSISGWGNNCAVMDPVFTSCGISSIPPTSTCPSMEGSTFPEGGSHEILPLNELGGASISMANSFTCGDEVTFQQPDTEFGVSDVSDNTNESGSNSNNVQDMDSCLISRPLGWSLDERMLRALSLFKESSPGGILAQVWVPMKHGNQFYLSTTDQPYLLDQMLTGYREVSRWYTFSAEGKLGSLLGLPGRVFNSKIPEWTSNVRYYSDAEYLRMEHAIGHEVYGSIALPIFSNELERSCCAVLEVVTTKEKPNFDAEIDIVSRALEIVSLRTIAPPRLYPQCLKQNQRSVLAEITDVLRAVCHAHRLPLALTWIPCCYTLQAVDEAARVRVKENDVSPKGKSVLCIEETACYVNDKATQGFVHACMEHHLEEGQGIVGKALQSNHPFFYPDVKAYNINEYPLVHHARKFGLNAAVAIRLRSTYTGADDYILEFFLPVNMKGSSEQQLLLNNLSGTMQRMCRSLRTVSKDELLGAKDPDAGFQSGMVGKSATTSRRNSQSTVTDSETRVSNSINDGTKAECPKKQQTTNGTRRQADKKRSTAEKNVSFSVLQQYFSGSLKDAAKSIGVCPTTLKRICRQHGILRWPSRKINKVNRSLGKIQTVLDSVKGVECRLKFDPTTGGLMAAGSLIPELNGQNSPLFSDNNPSIINLEPLPRDVNSVPPIPFDSQNPPVKLEMDDQRNSSRSLLIPEKEPSVCQLDCSEGSKSTGLDAASCQLSGLDVMDWDVPGNAAGSVTARKGNGLDFVENNLRSCSFGAANGVGTMWEGSDGMNEHYQPTTSSMTDSSNGSGLLIHGSSSSGQSVEERKHLQEKTSCVDSDSKIVVKASYKEDTVRFKFDPSLGYLQLYEEVGKRFKLNQGTFQLKYLDDEKEWVMLVSNSDMQECLEVMDEIGTRNVKFLVRDITCAVGSSGSSSCYLSGGS

SEQ ID NO: 306 - protein, 969 aa, Cucurbita pepo
  subsp. pepo
MENPFPSKEEGMGYWGPSRTQADALTFTDAGMRIPSPEDVLHSFSELMSFDSYAGWGNNCAVMDPVFTSCGISSIPPTSTCPSMEGSTFPEGGSHEILPLNELGGASISMANSFTCGDEVTFQQPDTEFGVSDVSDNTNESGSNSNNVQDMDSCLISRPISWSLDERMLRALSLFKESSPGGILAQVWVPMKHGNQFYLSTTDQPYLLDQMLTGYREVSRWYTFSAEGKLGSLLGLPGRVFNSKIPEWTSNVRYYSENEYLRMEHAIGHEVYGSIALPIFSNELERSCCAVLEVVTTKEKPNFDAEIDIVSRALEIVSLRTIAPPRLYPQCLKQNQRSVLAEITDVLRAVCHAHRLPLALTWIPCCYTLQAVDEAARVRVKENDVSPKGKSVLCIEETACYVNDKATQGFVHACMEHHLEEGQGIVGKALQSNHPFFYPDVKAYNINEYPLVHHARKFGLNAAVAIRLRSTYTGADDYILEFFLPVNMKGSSEQQLLLNNLSGTMQRMCRSLRTVSKDELLGAKDPDAGFQSGMAGKSATTSRRNSQSTVTDSETRVSNSINDGTKAECPKKQQTTNGTRRQADKKRSTAEKNVSFSVLQQYFSGSLKDAAKSIGVCPTTLKRICRQHGILRWPSRKINKVNRSLGKIQTVLDSVKGVECRLKFDPTTGGLMAAGSLIPELNGQNSPLFSDNNPSIINLEPLPRDVNSVPPIPFDSQNPAVKLEMDDQRNSSRSVLIPEKEPSVCQLDCGEGSKSTGLDAASCQLSGLDVMDWDVPGNAAGCITAKKGNGLDFVENNLRSCSFGAANGVGTMWEGSDGMNEHYQPTTSSMTDSSNSSGLLIHGSSSSGQSVEERKHLQEKTSCVDSDSKIVVKASYKEDTVRFKFDPSLGYLQLYEEVGKRFKLNQGTFQLKYLDDEKEWVMLVSNSDMQECLEVMDEIGTRNVKFLVRDITCAVGSSGSSSCYLSGGS

SEQ ID NO: 307 - protein, 968 aa, Cucurbita pepo
  subsp. pepo
MENPFPSKEEGMGYWGPSRTQADALTFTDAGMRIPSPEDVLHSFSELMSFDSYAGWGNNCAVMDPVFTSCGISSIPPTSTCPSMEGSTFPEGGSHEILPLNELGGASISMANSFTCGDEVTFQQPDTEFGVSDVSDNTNESGSNSNNVQDMDSCLISRPISWSLDERMLRALSLFKESSPGGILAQVWVPMKHGNQFYLSTTDQPYLLDQMLTGYREVSRWYTFSAEGKLGSLLGLPGRVFNSKIPEWTSNVRYYSENEYLRMEHAIGHEVYGSIALPIFSNELERSCCAVLEVVTTKEKPNFDAEIDIVSRALEIVSLRTIAPPRLYPQCLKQNQRSVLAEITDVLRAVCHAHRLPLALTWIPCCYTLQAVDEAARVRVKENDVSPKGKSVLCIEETACYVNDKATQGFVHACMEHHLEEGQGIVGKALQSNHPFFYPDVKAYNINEYPLVHHARKFGLNAAVAIRLRSTYTGADDYILEFFLPVNMKGSSEQQLLLNNLSGTMQRMCRSLRTVSKDELLGAKDPDAGFQSGMAGKSATTSRRNSQSTVTDSETRVSNSINDGTKAECPKKQTTNGTRRQADKKRSTAEKNVSFSVLQQYFSGSLKDAAKSIGVCPTTLKRICRQHGILRWPSRKINKVNRSLGKIQTVLDSVKGVECRLKFDPTTGGLMAAGSLIPELNGQNSPLFSDNNPSIINLEPLPRDVNSVPPIPFDSQNPAVKLEMDDQRNSSRSVLIPEKEPSVCQLDCGEGSKSTGLDAASCQLSGLDVMDWDVPGNAAGCITAKKGNGLDFVENNLRSCSFGAANGVGTMWEGSDGMNEHYQPTTSSMTDSSNSSGLLIHGSSSSGQSVEERKHLQEKTSCVDSDSKIVVKASYKEDTVRFKFDPSLGYLQLYEEVGKRFKLNQGTFQLKYLDDEKEWVMLVSNSDMQECLEVMDEIGTRNVKFLVRDITCAVGSSGSSSCYLSGGS

SEQ ID NO: 308 - protein, 923 aa, Cucurbita pepo
  subsp. pepo
MATNLSISGWGNNCAVMDPVFTSCGISSIPPTSTCPSMEGSTFPEGGSHEILPLNELGGASISMANSFTCGDEVTFQQPDTEFGVSDVSDNTNESGSNSNNVQDMDSCLISRPISWSLDERMLRALSLFKESSPGGILAQVWVPMKHGNQFYLSTTDQPYLLDQMLTGYREVSRWYTFSAEGKLGSLLGLPGRVFNSKIPEWTSNVRYYSENEYLRMEHAIGHEVYGSIALPIFSNELERSCCAVLEVVTTKEKPNFDAEIDIVSRALEIVSLRTIAPPRLYPQCLKQNQRSVLAEITDVLRAVCHAHRLPLALTWIPCCYTLQAVDEAARVRVKENDVSPKGKSVLCIEETACYVNDKATQGFVHACMEHHLEEGQGIVGKALQSNHPFFYPDVKAYNINEYPLVHHARKFGLNAAVAIRLRSTYTGADDYILEFFLPVNMKGSSEQQLLLNNLSGTMQRMCRSLRTVSKDELLGAKDPDAGFQSGMAGKSATTSRRNSQSTVTDSETRVSNSINDGTKAECPKKQQTTNGTRRQADKKRSTAEKNVSFSVLQQYFSGSLKDAAKSIGVCPTTLKRICRQHGILRWPSRKINKVNRSLGKIQTVLDSVKGVECRLKFDPTTGGLMAAGSLIPELNGQNSPLFSDNNPSIINLEPLPRDVNSVPPIPFDSQNPAVKLEMDDQRNSSRSVLIPEKEPSVCQLDCGEGSKSTGLDAASCQLSGLDVMDWDVPGNAAGCITAKKGNGLDFVENNLRSCSFGAANGVGTMWEGSDGMNEHYQPTTSSMTDSSNSSGLLIHGSSSSGQSVEERKHLQEKTSCVDSDSKIVVKASYKEDTVRFKFDPSLGYLQLYEEVGKRFKLNQGTFQLKYLDDEKEWVMLVSNSDMQECLEVMDEIGTRNVKFLVRDITCAVGSSGSSSCYLSGGS

SEQ ID NO: 309 - protein, 973 aa, Cucurbita pepo
  subsp. pepo
MENPFSSKEEGMMGYWGPSRTQAETMNSTDAGMRILSPEDVLPTFSDMMNFDSYAAIDQIFTSCGFSSMPQMSTCGSIEGLSFVEGGCHEGFPLNEHGGASISMANSFTCGDKAMFQLPDTEFGVSNVSDNANKVDSKSNDVPVDMDSCLISRPFGWSLDEKMLRVLSMFKESSPGGILAQVWVPVKHGDQFFLSTSEQPYLLDQMLTGYREVSRSFTFSAEGKLGSLLGLPGRVFTSKLPEWTSNVRYYSDHEYLRMQHAIGHDVYGSIALPVFNNEVEKSCCAVLEVVTTKEKPNFDAEIDIVSQALETVSLSTVPPPRLYSQCLKKNQRAALAEIVDVLRVVCHAHRLPLALTWIPCCYSFDAVDEVARVRVKENNINPEEKFVLCIEETACYVNDKSTQGFVHACLEHHLEEGQGIAGKALQSNHPFFYPDVKAYDINKYPLVHHARKFGLNAAVAIRLRSMYTGNDDYILEFFLPVNMKGAAEQQLLLNNLSVTMQRMCRSLRTVSKEELIGAEDSVVDFQSGLIGKSTTTSMRNSQSTVTDSETRVSNSINNGAEAECPEKQMTDGSWKQGEKKRSTSEKNVSLSVLQQYFSGSLKDAAKSIGVCPTTLKRICRQHGILRWPSRKINKVNRSLRKIQTVLDSVKGVEGGLKFDPTTGCLMAGSLIPELNAQNSLLFSDNNPAIPNLDLFLHDVNSVPSAPFNTQNSAIKLEMDESSVSISQRTSSRGVLIPEKEPNVRQHDCSEGLESAGVDAASCQLADLDMMSWDVQGNASVSIAAKKSDRLDFVKNDLRSGDADCQFMAKSSISFAAADEVGTVLNEHYQPTTSSMTDSSNGSGLMIHGSSSSSQSVERKHLPEKVGSVDSESKIIVKASYKDDTVRFKFDPCLGYLQLYEEVGMRFKLNQGTFQLKYLDDEKEWVMLVSNSDLQECLEVMDEIGTRNVRFLVRDIVCAVGSSGSSSCFLSGCS

SEQ ID NO: 310 - protein, 992 aa, Fragaria vesca
MEYQFSTRQGKDQGCSSSGGAAVEGLVGLDGEARNVISEDIFNNIAELMNFDTYAGWCSSPGTMEQIGVSYPSVSYAPLDALSFAQQNGGALAVAEDGGSSFDCCDKIGFQQMDTTQFGASTDFNHAHDAAAKLKNGFVQQNNIMDTADYVISRPHGWSLNEKMLKALSLFKESSGGGILAQVWVPMKHGDHSFLSTCEQPYLLDHVLAGYREVSRMFTFSAEEKQGSVLGLPGRVFVSKVPEWTSNVSYYNKAEYLRVEHAADHQVRGSIALPVFDMNSEMSCCAVLELVSTKDKLNFDAEMEIVCNALQAVKLRTTTPPRILPHCLSRNQRAALTEITDVLRAVCHAHTLPLALTWIPCCYSDGDGEGIRRVRVREGITNSNEKCILCVEETACYVNDRTMQGFVHACAEHHLEEGNGIAGKALQSNHPFFIHDVKVYDIYDYPLVHHARRYGLNAAVAIRLRSTYTGDDDYILEFFLPVNMKGSSEQQLLLNNLSGTMQRICKSLRTVSDAELTGVEGSDNGFQREAIPNTPSIPRRNSQSPSSDSEMKSAENIPSNVFNRKDGGVEVDFPPEHAPNGSRRQAEKKRSTAEKNVSLSVLQQYFSGSLKDAAKSIGVCPTTLKRICRQHGISRWPSRKINKVNRSLKKIQTVLDSVQGVEGGLKYDPTTGGFVATGSIIQEFDAQQNLFFPEKNLPAQNIVPVPQYPVSVPSMSCKDGERFEIKLEEDGCCMNGGTPIPTAHQEKEEVKKQNISVVDCSMNSKPIAIDFGSCQPTDHDTMPHNCPETDFGVSYLVKEVNRWGQSNDSLTLESSGCHFVPQSSSSFVVADEMDIGVDRDGGNVNYNQPTSSSMTDSSNSSGSMMHGCSSSSQSFEERKYQVKETNVEIGSKIIVKATYKEDTIRFKFEPSGGCLKLYEEVAKRLKLQDGTFQLKYLDDEQEWVMLVSDADLRECLEILDDIGTHSVKFMVRDIPFGVSSSGSSNCFLAGGS

SEQ ID NO: 311 - protein, 1004 aa, Glycine max
MMRLLGCWLTRTKPLVQSLIQRNSNIGQISTSIFLSNLIMEDHVSPEGKEVSCCTPPGAQLEEPTSVDGGMKKSASEDMFSNFSELMNFDTYAGWSNSPSMTDQSLANVFSSFSLAPYPVPDVLNLVEHGNGPFFMTEDSEIHNDMESAPSCGERIIFQQMDFQLGFLDEANDSNSLDSKQKPNGTSQEVNTTDMCNYIISSSPGRSLDDRMLRALSFFMESADGGMLAQVWVPIKHGDEFILSTSEQPYLLDPKLAGYREVSRAFTFSAEGKTQSCPGLPARVFISHVPEWTSNVGYYNKTEYLRLEHARNHEIRGSIALPISDVHSQVPCAVLELVTTKEKPNFDRELEIVSQALQLVNLRTTMPPRLHPQCLSSNKRAALTEIIDVLRAVCHAHRLPLALTWIPCCYSEGIRNETDRIRIKEGHTSPNEKCVLCIEESACYVNDGAVEGFVHACVEHHLEEGQGIAGKALQSNHPFFYTDVKTYDIGEYPLVHHARKYNLNAAVAIRLRSTYTNDDDYILEFFLPVNMTGSSEQELLLDNLSSTMRRICKSLRTVSDAELTGIEGSQGGFPKEKVSGFFPMSRRNSQIAFISDDHDSVLKMSLKASNMRNNGIEAVHSQTMNGSRKQVEKKRSTVENNVSLSVLQQYFSGSLKDAAKSIGVCPTTLKRICRQHGISRWPSRKINKVNRSLKKIQTVLDSVQGVEGGLKFDPYTGGFIAGGSIMQETEAHKYLVFPEKSSVKDPKPATQKKVSVAPAPASTIENSTIKLNDDEGVCLVGNKLVHSRSIPNSNSGEGELKKDNVSSDDSKSMTMNDGSCHKACHWKKTKDCPEQTCSMSLVTDEVEVGVDRVEGADEHNHPTSSSTTNSSNGSGSMMHGSSSCSHENQKYSKVKSNCVDSGSKMIVKASYRGDTIRFKFDPSSGCFQLYKEVATRFKLQNGSFQLKYLDDEEEWVMLVNDSDLQECTEILDDIGTRCVKFLVRDVPCVLSSHGSNSCFLSDSS

SEQ ID NO: 312 - protein, 965 aa, Glycine max
MEDHVSPEGKEVSCCTPPGAQLEEPTSVDGGMKKSASEDMFSNFSELMNFDTYAGWSNSPSMTDQSLANVFSSFSLAPYPVPDVLNLVEHGNGPFFMTEDSEIHNDMESAPSCGERIIFQQMDFQLGFLDEANDSNSLDSKQKPNGTSQEVNTTDMCNYIISSSPGRSLDDRMLRALSFFMESADGGMLAQVWVPIKHGDEFILSTSEQPYLLDPKLAGYREVSRAFTFSAEGKTQSCPGLPARVFISHVPEWTSNVGYYNKTEYLRLEHARNHEIRGSIALPISDVHSQVPCAVLELVTTKEKPNFDRELEIVSQALQLVNLRTTMPPRLHPQCLSSNKRAALTEIIDVLRAVCHAHRLPLALTWIPCCYSEGIRNETDRIRIKEGHTSPNEKCVLCIEESACYVNDGAVEGFVHACVEHHLEEGQGIAGKALQSNHPFFYTDVKTYDIGEYPLVHHARKYNLNAAVAIRLRSTYTNDDDYILEFFLPVNMTGSSEQELLLDNLSSTMRRICKSLRTVSDAELTGIEGSQGGFPKEKVSGFFPMSRRNSQIAFISDDHDSVLKMSLKASNMRNNGIEAVHSQTMNGSRKQVEKKRSTVENNVSLSVLQQYFSGSLKDAAKSIGVCPTTLKRICRQHGISRWPSRKINKVNRSLKKIQTVLDSVQGVEGGLKFDPYTGGFIAGGSIMQETEAHKYLVFPEKSSVKDPKPATQKKVSVAPAPASTIENSTIKLNDDEGVCLVGNKLVHSRSIPNSNSGEGELKKDNVSSDDSKSMTMNDGSCHKACHWKKTKDCPEQTCSMSLVTDEVEVGVDRVEGADEHNHPTSSSTTNSSNGSGSMMHGSSSCSHENQKYSKVKSNCVDSGSKMIVKASYRGDTIRFKFDPSSGCFQLYKEVATRFKLQNGSFQLKYLDDEEEWVMLVNDSDLQECTEILDDIGTRCVKFLVRDVPCVLSSHGSNSCFLSDSS

SEQ ID NO: 313 - protein, 973 aa, Glycine max
MEYPFSPKESVIGDWQSSGAQLEGSASLDGRMSNSIPEDMPNSFSELMNFDTYAGLCNSPSITDQILANDLPSFASLSYPLPDGFNLVQQYSGQYCMSGVGRNNNDMESSPIYGEKVVCQQMDTLLGCLNDTNEANNLNSKLKMNSSSQHLNNFDTGNYMMSRSPGLSLDERMLRALSFFKESAGGGILAQVWVPIKHGDQFILSTSDQPYLLDQMLAGYREVSRTFTFSTEGKSGCFLGLPGRVFTSKVPEWTSNVGYYSMSEYLRFEHAINHKVRGSIAIPIFDLHSEFPCCAVLELVTTKEKPDFDRELEIVRHALQLVNLRTVKTLRCLPQSLSNNKKATLTEIVDVLRSVCHAHRLPLALTWIPCGYTECSRGEASRIRIKGGHSTSSEKSVLCLEESACYITDRAMAGFIRACMEHHLEEGKGIAGKALQSNHPFFYPDVKTYDISEYPLVHHARKYNLNAAVAIRLRSTYTNDDDYILEFFLPVNMRGSSEQQLLLDNLSGTMQRICSSLRTVSETELSGIESSPVGLGKKNAPSFFPLSSRNSDIPLINGDCDSVQKMSLKATTNLKDNEIEPSPNQERNGSKRQVQKNRSTSEKNVSLSVLQQYFSGSLKDAAKKIGVCPTTLKRICRQHGIPRWPSRKINKVNRSLKKIQTVLDSVQGMEGGLKFDPSMGAFVAGGSIIQEIDAPKSTIKDPVPVTQDAFSVPPAPCSEGENFSIKLEGKLKKTNVSSVDYSEDSKSMAINDGSCQMASLCTKVQDCPEQACLGSVLAKEHDKRILNKGGLSVEKFKHNIVGQSSKSLIADEMDIGVDGDDGVVERNHPTSSSLTDSSNGSGSMMHSSSSGSRSFENQDQSKVKSTIIDCGSKLIVKATYREDTIRFKFDPSEGCFRLYEEVAARFKLQNGLFQLKYLDDEEEWVMLVNDADLQECIEILDDIGTRSVRFLVRDMPSVLSSSGSSNSYLGGSS

SEQ ID NO: 314 - protein, 971 aa, Glycine max
MEDHVSPEGKEVSCCAPPGAQLEESTSVDGGKKNSSSEDMFSNFSELMNFDTYAGWSNSPSMTDLSVANVFSLFSSAPYPPPDGLNLVEQSNGSFFMTEDSEFHNGMESSPSCVERVIFQQMDIHLGFLDEANDSNNLDSKEKLNGKSQQVNTSDMCNYIISRSPGRSLDDRMLRALSFFMESADEGMLAQVWVPTKHGDEFILSTSQQPYLLDPKLAGYREVSRAFTFSAEGKTRTCPGLPARVFISHVPEWTSNVGYYNKTEYLRLEHAKNHEIRGSIALPISDVHSQVPCAVLELVTTKEKANFDRELEIFSHALQLVNLRTSMPPRLLPQCLSSNKRVALTEIIDVLRAMCHAHRLPLALTWIPCCYSEGIRDETERIRIKEGHTSSNEKCVLCIEESACYVNDGGVGGFVHACIEHHLEEGQGIAGKALQSNHPFFYTDVKTYDIGEYPLVHHARKYNLNAAVAIRLRSTYTNGDDYILEFFLPVNMTGSSEQQLLLDNLSGTMRRICKSLRTVSDAELTGIDGSQGGFPKEKVSGFFPMSRRNSEIAFINGDHDSVQKMSMKTSNMRNNGTEAVHSQAMNGSRKQVEKKRSTVEKNVSLSVLQQYFSGSLKDAAKSIGVCPTTLKRICRQHGISRWPSRKINKVNRSLKKIQTVLDSVQGVEGGLKFDPYTGGFIAGGSIMQEIDAHKYLVFPKKSSVKDPKPATQKTVSVAPAPGSTRENSTIKLNDDESVCLVRNKFVHSRNVLNSNSSKGELKKDNVSSDDCCDDSKSMAMNDGSCQKSCLWTKTQDCPEQTCSISLVTDEVEVGVDRVEGADEHNHPTSSSTTHSSNGSGSMMHGSSSCSQSFEKQKHSKVKSNCVDSGSKMIVKASYRGDTIRFKFDPSSGCFQLYEEVATRFKLQNGSFQLKYLDDEEEWVMLVNDSDLQECTEILGDIGTRFVKFLVRDVPCVFRSRGSNSCFLSDSS

SEQ ID NO: 315 - protein, 981 aa, Glycine max
MEYPFSPKDRVIGDWQSSGAQLEGSASLDGRMINSISEDMPNSFSELMNFDTYAGLCYSPSITDQILANELPSFAPLSYPLPDGFNPVQLNSGQCCMSGVGRNNNDTENSSLYGEKVVCQQMDTLLGFLNDTNEANNLNSKLKINVSSQHLNNSDTGNYMMSRPPGLSLDERMLRALSFFKESAGGGILAQVWVPIKDGDQFILSTSEQPYLLDQMLAGYREVSRTFTFSAEGKSGCSLGLPGRVFTSKVPEWTSNVGYYSMSEYLRFEHAINHKVCGSIAFPIFDLHSELPCCAVLELVTTNEKPDFDRELEIVCRALQLVNLRTAKPLRCLPQCLSNNKKATLTEIVDVLRSVCHAHRLPLGLTWIPCCFTECSRGEASSIRIEGGHSTSRGKNILCLEESACYITDRAMGGFVRACMEHRLEEGKGIAGKALQSNHPFFYPDVKTYDISEYPLVHHARKYNLNAAVAIRLRSTYTNDDDYILEFFLPVNMKGSSEQQLLLDNLSGTMQRICSSLRTVSETELSGMESLAVGLGKKNAPSFFPLSSRNSEIPLINGDCDSVQKATNLRDNEIESSPNQERNGSKRQVQKNRSTSEKNVSLSVLQQYFSGSLKDAAKNIGVCPTTLKRICRQHGIPRWPSRKINKVNRSLKKIQTVLDSVQGVEGGLKVLDSVQGVEGVLKFDPSMGAFVAGGSIIQEIDAHKSTIKDPVPVAQDAFSVRPAPCSEGENFSIKLEGKLKKTNVSSVNYSEDSKSMAINDGSCQTASLCTKVQDCPEQACLGSVLAKEHDKRILNKGGLSVEKFKRNIVGQSSKTLIGDEMDIGVDGDDGVVERNHPTSSSLIDSSNGSGSMMHSSSSGSQSFKNQDQSKVKSTIVDSRSKLIVKATYREDTIRFKFDPCAGCFSLYEEVAARFKLQNGLFQLKYLDDEEEWVMLVNNADLQECIEILDDIGTRSVRFLVRDMPSVLGSSGSSNSYLGGSS

SEQ ID NO: 316 - protein, 938 aa, Glycine max
MEYPFSPKDRVIGDWQSSGAQLEGSASLDGRMINSISEDMPNSFSELMNFDTYAGLCYSPSITDQILANELPSFAPLSYPLPDGFNPVQLNSGQCCMSGVGRNNNDTENSSLYGNYMMSRPPGLSLDERMLRALSFFKESAGGGILAQVWVPIKDGDQFILSTSEQPYLLDQMLAGYREVSRTFTFSAEGKSGCSLGLPGRVFTSKVPEWTSNVGYYSMSEYLRFEHAINHKVCGSIAFPIFDLHSELPCCAVLELVTTNEKPDFDRELEIVCRALQLVNLRTAKPLRCLPQCLSNNKKATLTEIVDVLRSVCHAHRLPLGLTWIPCCFTECSRGEASSIRIEGGHSTSRGKNILCLEESACYITDRAMGGFVRACMEHRLEEGKGIAGKALQSNHPFFYPDVKTYDISEYPLVHHARKYNLNAAVAIRLRSTYTNDDDYILEFFLPVNMKGSSEQQLLLDNLSGTMQRICSSLRTVSETELSGMESLAVGLGKKNAPSFFPLSSRNSEIPLINGDCDSVQKATNLRDNEIESSPNQERNGSKRQVQKNRSTSEKNVSLSVLQQYFSGSLKDAAKNIGVCPTTLKRICRQHGIPRWPSRKINKVNRSLKKIQTVLDSVQGVEGGLKVLDSVQGVEGVLKFDPSMGAFVAGGSIIQEIDAHKSTIKDPVPVAQDAFSVRPAPCSEGENFSIKLEGKLKKTNVSSVNYSEDSKSMAINDGSCQTASLCTKVQDCPEQACLGSVLAKEHDKRILNKGGLSVEKFKRNIVGQSSKTLIGDEMDIGVDGDDGVVERNHPTSSSLIDSSNGSGSMMHSSSSGSQSFKNQDQSKVKSTIVDSRSKLIVKATYREDTIRFKFDPCAGCFSLYEEVAARFKLQNGLFQLKYLDDEEEWVMLVNNADLQECIEILDDIGTRSVRFLVRDMPSVLGSSGSSNSYLGGSS

SEQ ID NO: 317 - protein, 1000 aa, Glycine soja
MEDHVSPEGKEVSCCAPPGAQLEESTSVDGGKKNSSSEDMFSNFSELMNFDTYAGWSNSPSMTDLSVANVFSLFSSAPYPPPDGLNLVEQSNGSFFMTEDSEFHNGMESSPSCVERVIFQQMDIHLGFLDEANDSNNLDSKEKLNGKSQQVNTSDMCNYIISRSPGRSLDDRMLRALSFFMESADEGMLAQVWVPTKHGDEFILSTSQQPYLLDPKLAGYREVSRAFTFSAEGKTRTCPGLPARVFISHVPEWTSNVGYYNKTEYLRLEHAKNHEIRGSIALPISDVHSQVPCAVLELVTTKEKANFDRELEIFSHALQRLGYLSTKVIMEKFLPCTNDKCLYDDFKQLVNLRTSMPPRLLPQCLSSNKRVALTEIIDVLRAMCHAHRLPLALTWIPCCYSEGIRDETERIRIKEGHTSSNEKCVLCIEESACYVNDGGVGGFVHACIEHHLEEGQGIAGKALQSNHPFFYTDVKTYDIGEYPLVHHARKYNLNAAVAIRLRSTYTNGDDYILEFFLPVNMTGSSEQQLLLDNLSGTMRRICKSLRTVSDAELTGIDGSQGGFPKEKVSGFFPMSRRNSEIAFINGDHDSVQKMSMKTSNMRNNGTEAVHSQAMNGSRKQVEKKRSTVEKNVSLSVLQQYFSGSLKDAAKSIGVCPTTLKRICRQHGISRWPSRKINKVNRSLKKIQTVLDSVQGVEGGLKFDPYTGGFIAGGSIMQEIDAHKYLVFPKKSSVKDPKPATQKTVSVAPAPGSTRENSTIKLNDDESVCLVRNKFVHSRNVLNSNSSKGELKKDNVSSDDCCDDSKSMAMNDGSCQKSCLWTKTQDCPEQTCSISLVTDEVEVGVDRVEGADEHNHPTSSSTTHSSNGSGSMMHGSSSCSQSFEKQKHSKVKSNCVDSGSKMIVKASYRGDTIRFKFDPSSGCFQLYEEVATRFKLQNGSFQLKYLDDEEEWVMLVNDSDLQECTEILGDIGTRFVKFLVRDVPCVFRSRGSNSCFLSDSS

SEQ ID NO: 318 - protein, 1009 aa, Glycine soja
MEYPFSPKDRVIGDWQSSGAQLEGSASLDGRMSNSISEDMPNSFSELMNFDTYAGLCYSPSITDQILANELPSFAPLSYPLPDGFNPVQLNSGQCCMSGVGRNNNDTENSSLYGEKVVCQQMDTLLGFLNDTNEANNLNSKLKINVSSQHLNNSDTGNYMMSRPPGLSLDERMLRALSFFKESAGGGILAQVWVPIKDGDQFILSTSEQPYLLDQMLAGYREVSRTFTFSAEGKSGCSLGLPGRVFTSKVPEWTSNVGYYSMSEYLRFEHAINHKVCGSIAFPIFDLHSELPCCAVLELVTTNEKPDFDRELEIVCRALQACFYFSSVTSLSALFACLTTSHVESDVEGSNDKCIYHGFLQLVNLRTAKPLRCLPQCLSNNKKATLTEIVDVLRSVCHAHRLPLGLTWIPCCFTECSRGEASSIRIEGGHSTSRGKNILCLEESACYITDRAMGGFVRACMEHRLEEGKGIAGKALQSNHPFFYPDVKTYDISEYPLVHHARKYNLNAAVAIRLRSTYTNDDDYILEFFLPVNMKGSSEQQLLLDNLSGTMQRICSSLRTVSETELSGMESLAVGLGKKNAPSFFPLSSRNSAIPLINGDCDSVQKATNLRDNEIESSPNQERNGSKRQVQKNRSTSEKNVSLSVLQQYFSGSLKDAAKNIGVCPTTLKRICRQHGIPRWPSRKINKVNRSLKKIQTVLDSVQGVEGGLKFDPSMGAFVAGGSIIQEIDAHKSTIKDPVPVAQDAFSVRPAPCSEGENFSIKLEGKLKKTNVSSVNYSEDSKSMAINDGSCQTASLCTKVQDCPEQACLGSVLAKEHDKRILNKGGLSVEKFKRNIVGQSSKTLIGDEMDIGVDGDDGVVERNHPTSSSLIDSSNGSGSMMHSSSSGSQSFKNQDQSKVKSTIVDSRSKLIVKATYREDTIRFTFDPCAGCFSLYEEVAARFKLQNGLFQLKYLDDEEEWVMLVNNADLQECIEILDDIGTRSVRFLVRDMPSVLGSSGSSNSYLGGSS

SEQ ID NO: 319 - protein, 974 aa, Humulus lupulus
MEQPFSSKERENDYWSSSRAQVESLPSSDGVPRGMLPEDVFNSFSELLSFDTYVGWSNNPTVTDQVSATYGLSSFPSTIYTPQDGSDFIEQDVEARSVTEVGGNLNLPRSSFDYGEKVVFQPEDTQFEASAHSNNGSDSVAKQNNGFFQENSEIDMANSTIQRPARFSLDEKMLKALSFVKETSGGGILAQVWVPVRRGDQLILSTSEQPYLLDHMMVGYREVSRMYTFSAEGKPGCFPGLPGRVFQSKIPEWTSDVRYYKKNEYVRVEHAYDHHVRGCIALPVCEPDLRMTCCAVLEIVTTREKQNFDAEIEIVSNALQAVDLRMNQPPRLNPQCLSKNQKDALAEIIDVLRAVCHAHRLPLALTWIPCYGEGTSNEGAGVRVKEGKSSSSEKCILCVEKAACYVNDRLMQGFAHACVEHHLEVGQGLAGKALQSNLPFFFPDVKTYDISDYPLVHHARKFGLNAAVAIRLRSTYTGDCDYILEFFLPVNMKGASEQQLLLNNLSSTMQRICKSLRTVSDVEVGIISHDTFQEGSVPNFMSLPGDSSKMAQSDNDLNSANELPLKLSARKNEAHEADSVHEQPLQTTRGTRRQTEKKRSTAEKNVSLSVLQQYFSGSLKDAAKSIGVCPTTLKRICRQHGISRWPSRKINKVNRSLKKIQTVLDSVQGVEGGLKFDPTTGGLVAAGSISQEFESQKIPFFVEKTASLQNSDPTLTVKLEEDECCTDGINSNSYKIRNPNIITPTNSTKDSKIAIKAVSKPVSGAFSEKISLGSYHATEGMTSSHSKCSSKFENSDGHHVSWISGSLAVGNEMDTAEDGENAELVEHNQPASSSMTDSSNGRGSMLHGSSSSSQSFEEHKHPKGKTSCADSCSKIIVKATYREDTVRFKFDTSGGCYQLYEEVAKRFKLQTGTFQLKYLDDEEEWVMLVSDMDLQECLEILDDVGTQSVKFQVRDMPCVVGSSGSSNCFLAGGS

SEQ ID NO: 320 - protein, 984 aa, Jatropha curcas
MENPFSSNEKGISYFASPRAQADSMVPPDGGTRNSIPEDVFNNFSEFMNMDTYAGWCNSPSAADQMFSSYGFSSFQSTPCASFDALNIPEHNSSTFLVGGDAFNDAGTYYSCGDKMVIQQSTSQFVYPSDSVGADDSGAKQSDGAHRQRFISDMAEIAKPVGLSLDEKMLRALSMLKETAGGGILAQVWVPIRRGEQYILSTFEQPYLLDQALAGYREVSRTYTFSAEMKPDLPLGLPGRVFISKVPEWTSNVIYYSNTEYLRVKHALNHKVQGSIALPIFEPLDMSCCAVLELVTVKEKPDFDSEMENVCYALQAVNLRTTAPPRLLTQTLSRNQRAALAEITDVLRAVCYAHSLPLALTWIPCNYAEEAVDEIVKVRVKDGHSRSTGKSVLCIEGTACYVNDREMQGFVHACLEHYIEEGQGIAGKAVQSNHPFFFPDVKAYDITEYPLVHHARKYGLNAAVAIRLRSTYTGDDDYILEFFLPVNIKGSSEQQLLLNNLSSTMQRICKSLRTVSDAELERGGGSTVGFQKGTVPSFSPMLVSTRSCQPTDTVSHLNLADRITFDASSSKNDRMESDGTHEQMMDGPRRQPEKKRSTSEKNVSLSVLQQYFSGSLKDAAKSIGVCPTTLKRICRQHGISRWPSRKINKVNRSLRKIQTVLDSVQGVEGGLKFDPTTGGFVAAGSIIQDSDHQKSFAFHDKQLPAGNSESANEDAVSVPPAPCIDGDNSTVKVEEDEFCIDTSRGLMMKSSIPVIDYSEDSRSVATDAGICQEAGLGCRRWSCLENSSALAKGRKWGLNIVSMKLENSDTHITSRSSCSLAAAESDTKIEGDNGTVDHNQHTCSSMTDSSNGSGSIMHGSASSSPSFEGEKQSNVITGYEDSGQKITVKATYKEDTIRFKFDPFMGCFQLYEEVAKRFKLQNGTFQLKYLDDEREWVMLVSDSDLQECVEILDYIGAHTVKFLVRDTPLTMGSSGSSNCFLGGS

SEQ ID NO: 321 - protein, 1006 aa, Juglans regia
MDYPLFSKEKGTGFWASSKVQMENLLSFDGTRNLNSEENFTELMNFDTYAGWCNSPGAADQIFTSYGLSSSASMPHGASLDALNFTEQNTGAFPVNESHGNFNPMENSFNSGDKTMFQQMDTRYGFSMDSNDTNDVAAAQNTGSFQQNNALNIENYIIPRPFSWSVDEKMLRALSLFKESSGGGILAQVWVPMRLGDHYVLSTSEQPYLLDQMLAGYREVSRLFTFSAERGSDSFLGLPGRVFISKVPEWTSNVRYYNKIEYLRVDHAANHEVRGSIALPVFDSHSMSCCAVLELVTTKEKPNFDKEMEIVCNALRAVNLSTAAPPRLHPQCLSVNQRAALAEIIDVLRAVCHAHRLPLAQTWIPCCYTERAGKEITGVRVREGKTNSDEKYILCIEETACYVNDQMMEGFVHACLEHHLDEGQGIAGKALQSNHPFFFPDVKTYDISEYPLVHHARKFGLNAAVSIRLRSTYTGDADYILEFFLPVSMKGSLEQQLLLNNLSGTMQRICKSLRTVSDRELAGGEGSNVAFQMGAVQKFTPMTMSKRNSQATSSDSDVNSTKKLPEKIHQKVSDARNDGIEADSPHEQVLFARSGSRRQEKKRNTAEKNVSLNVLQQYFSGSLKDAAKSIGVCPTTLKRICRQHGISRWPSRKINKVNRSLRKIQTVLDSVQGVEGGLKFDPTTGEFVASGSTTQESDSQKGLLFQDTDMCVKNAMPATQNAVSVPSTPGVSSLIKPEVDDCSMGNQVGPSSELAINACEGELDKPSVSWLDCSEDSNIAAIDAVSCRLASLETAPPTSSENATLGSYLVDRGEKWGLKRGSLKLVDSDSHFAPRSSISLAAANEMHTGVGGDAGIVEHNQPTSSSLTDSSDGSLSMMHGSSSSSQSFEEQKHSKVKTSCVDGGSKITVKATYREDTIRFKFEPSAGFFQLYEEVAKRFKLQNGIFQLKYLDDEEEWVMLESDADLQECLEILDDIGTHNVKFLVRDVPCTISSSGSSNCFLNGGS

SEQ ID NO: 322 - protein, 1003 aa, Juglans regia
MDYPLFSKEKGTGFWASSKVQMENLLSFDGTRNLNSEENFTELMNFDTYAGWCNSPGAADQIFTSYGLSSSASMPHGASLDALNFTEQNTGAFPVNESHGNFNPMENSFNSGDKTMFQQMDTRYGFSMDSNDTNDVAAAQNTGSFQQNNALNIENYIIPRPFSWSVDEKMLRALSLFKESSGGGILAQVWVPMRLGDHYVLSTSEQPYLLDQMLAGYREVSRLFTFSAERGSDSFLGLPGRVFISKVPEWTSNVRYYNKIEYLRVDHAANHEVRGSIALPVFDSHSMSCCAVLELVTTKEKPNFDKEMEIVCNALRAVNLSTAAPPRLHPQCLSVNQRAALAEIIDVLRAVCHAHRLPLAQTWIPCCYTERAGKEITGVRVREGKTNSDEKYILCIEETACYVNDQMMEGFVHACLEHHLDEGQGIAGKALQSNHPFFFPDVKTYDISEYPLVHHARKFGLNAAVSIRLRSTYTGDADYILEFFLPVSMKGSLEQQLLLNNLSGTMQRICKSLRTVSDRELAGGEGSNVAFQMGAVQKFTPMTMSKRNSQATSSDSDVNSTKKLPEKIHQKVSDARNDGIEADSPHEQARSGSRRQEKKRNTAEKNVSLNVLQQYFSGSLKDAAKSIGVCPTTLKRICRQHGISRWPSRKINKVNRSLRKIQTVLDSVQGVEGGLKFDPTTGEFVASGSTTQESDSQKGLLFQDTDMCVKNAMPATQNAVSVPSTPGVSSLIKPEVDDCSMGNQVGPSSELAINACEGELDKPSVSWLDCSEDSNIAAIDAVSCRLASLETAPPTSSENATLGSYLVDRGEKWGLKRGSLKLVDSDSHFAPRSSISLAAANEMHTGVGGDAGIVEHNQPTSSSLTDSSDGSLSMMHGSSSSSQSFEEQKHSKVKTSCVDGGSKITVKATYREDTIRFKFEPSAGFFQLYEEVAKRFKLQNGIFQLKYLDDEEEWVMLESDADLQECLEILDDIGTHNVKFLVRDVPCTISSSGSSNCFLNGGS

SEQ ID NO: 323 - protein, 972 aa, Lotus japonicus
MEYPFSPKGGELGYWQSPSAQFGGSISSDNGISNSISDDMPNSFSELLNFDSYAGWFTGPSVTDQIFANELPSFASVSYPLSDGFNLAEQNSGQFFTTGVCGNSSNLESSSTHGERVVCQQMDTLLGFLDETNDANTLNSKQKINDTLQQFSTFEEGNYTISRPPGPSLDERMLRALSFFKESAGGGILAQVWVPLEHGGQVILSTSEQPYLLDQMLAGYREVSRTFKFPAEGKPGGFSGLPGRVFVSKVPEWTSNVGYYSKNEYLRVEHARNYKVRGTIAFPIFDTHSELPCCAVLELVTTKEMSDFDRELEVVCHALQLVNLRTTMPLRIFPECYSNNKRAALAEIVDVLKSVCHAHRLPLALTWIPCCYTEGPKGEAMRIQIKEGHSSSGEKVLLCIEESACYVTDRLMEGFVRACIEHPLEEGKGIAGKALQSNHPFFYPDVKEYDISEYPLVHHARKCNLSAAVAIRLRSTHTNDDDYILEFFLPVNMRGSSEQQLLLDNLSGTMQRICRSLRTVSDVESSRIESTHMGFENKNLPSFSPLSRENSQIPLINANQDSVQKSLKASRLRNKGSKPPYNQVSNGSRRQVEKNRGTAEKNVSLSVLQQHFSGSLKDAAKSIGVCPTTLKRICRHHGISRWPSRKINKVNSSLKKIQTVLDSVQGVESSLKFDPSVGAFVAGGSTIQGIDTHKSLLFPEKSTIRDPRPITQDAVSVPAVPCGESEKSAIKLEGKLKKTNASLVDCCEDSKSMAMDDRSSHSSSLWTKAQGSSEQASLGSDLAKRDKWVLNNDGLRVENLKCNTVGQSSGSFTDDEMGIDVDNDEVVELNHPTCSSLTGSSNGSSPMIHGSSSSSQSFENQSKGKSTTVDRGSKIIVKATYRKDIIRFKFDPSAGCFKLYEEVAARFKLQNGTFQLKYLDDEEEWVMLVSDSDLQECVDILDDIGTRSVRFLVRDLPCVSEAVSTEAAHSEL

SEQ ID NO: 324 - protein, 972 aa, Lotus japonicus
MEYPFSPKGGELGYWQSPSAQFGGSISSDNGISNSISDDMPNSFSELLNFDSYAGWFTGPSVTDQIFANELPSFASVSYPLSDGFNLAEQNSGQFFTTGVCGNSSNLESSSTHGERVVCQQMDTLLGFLDETNDANTLNSKQKINDTLQQFSTFEEGNYTISRPPGPSLDERMLRALSFFKESAGGGILAQVWVPLEHGGQVILSTSEQPYLLDQMLAGYREVSRTFKFPAEGKPGGFSGLPGRVFVSKVPEWTSNVGYYSKNEYLRVEHARNYKVRGTIAFPIFDTHSELPCCAVLELVTTKEMSDFDRELEVVCHALQLVNLRTTMPLRIFPECYSNNKRAALAEIVDVLKSVCHAHRLPLALTWIPCCYTEGPKGEAMRIQIKEGHSSSGEKVLLCIEESACYVTDRLMEGFVRACIEHPLEEGKGIAGKALQSNHPFFYPDVKEYDISEYPLVHHARKCNLSAAVAIRLRSTHTNDDDYILEFFLPVNMRGSSEQQLLLDNLSGTMQRICRSLRTVSDVESSRIESTHMGFENKNLPSFSPLSRENSQIPLINANQDSVQKSLKASRLRNKGSKPPYNQVSNGSRRQVEKNRGTAEKNVSLSVLQQHFSGSLKDAAKSIGVCPTTLKRICRHHGISRWPSRKINKVNSSLKKIQTVLDSVQGVEGSLKFDPSVGAFVAGGSTIQGIDTHKSLLFPEKSTIRDPRPITQDAVSVPAVPCGESEKSAIKLEGKLKKTNASLVDCCEDSKSMAMDDRSSHSSSLWTKAQGSSEQASLGSDLAKRDKWVLNNDGLRVENLKCNTVGQSSGSFTDDEMGIDVDNDEVVELNHPTCSSLTGSSNGSSPMIHGSSSSSQSFENQSKGKSTTVDRGSKIIVKATYRKDIIRFKFDPSAGCFKLYEEVAARFKLQNGTFQLKYLDDEEEWVMLVSDSDLQECVDILDDIGTRSVRFLVRDLPCVSEAVSTEAAHSEL

SEQ ID NO: 325 - protein, 985 aa, Lotus japonicus
MEDHLSPKGKGIGYSASFDGGMKNSASEDMFNNISELMNFDTYAGWCNSPSMTDPNLANGLTPFVSVPYPPPDGLNLVEQSSGPFFMTEATGNYNDMQSSPSYGDRVVLQQMENQFEFFDVLNDTNNLDAKQKQSVPFQQLNTSDMGNHIMSWSSSWSLDERMLKALSFFKESAGGGILAQVWVPVKHGDEFILSTSEQPYLLDHKLAGYREVSRTFTFSAEGKAGSCPGLPGRVFTSHVPEWTSNVGYYNKTEYSRLEHAINHEVRGSIALPISDPDSKVPCSAVLELVTTKEKSNFDRELEIVSQALQHVHLRTITPPRLLPQSLSNNKRAALSEIIDVLRAVCHAHRLPLALTWIPCCYSEGIGDETERIRIKEGHISSNEKCVLCIEESACYINDKMVGGFVHACTEHHLEEGQGIAGKALQSNHPFFYPDVKSYDISEYPLVHHARKYNLNAAVAIRLRSTYTNDDDYILEFFLPVNMTGSLEQQLLLDNLSGTMQRICKSLRTVSDAELTGIESSQVGFQKEKVQGIFPISGRNSQTASIGCDYDLDRKMYLKATNLRNNGIEAARSQAINGSRKQVEKKRSTVEKNVSLSVLQQYFSGSLKDAAKSIGVCPTTLKRICRQHGISRWPSRKINKVNRSLKKIQIVLDSVQGMEGGLKFDPCTGGFVAGGSIIQDISAHKSILFPERSAVKDTEPVVREVVSGVPPAPGSPGENSAIELEDDGVCSVGNQLVHSTSVLMSNSYEGELKIDNASSADGSEDSKSMAVDDVTKAQDCPEQNSLGSVLEKEGDQWSLNKYGMGVENSIHDIVCNTNSSISLIELSGDGGNGADEHNHPTSSSMTDSSNGSGSMTLGCSSGSQSFENQKKSKAKSACVVDSGSKMVVKATYRGDTIRFKFDPSAGCFQLYEEVATRFKLQNGSFQLRYLDDEEEWVMMVNDSDLQECVEILGDIGATCVKFLVRDTTGVLRSRSSNSCFLSESS

SEQ ID NO: 326 - protein, 933 aa, Lupinus angustifolius
MQYPYSPKGRGIGYQSCPRSQLEGSTSLDSRMSNSISESIPNSFSELLNIDAYFCNSPSMTDQILSNWLPSFASVPYPSPDRFNLMEHNCGQFYTTEVNGNCSATETLPSYGERAVFQQMDNLPSFSDDATNFNSKQKVNGSAQNHNKFDMGNYLISRPPGLSLDERMLRALSFFKASAGEGILAQVWVPIKHGDQFVLTTSEQPYLLDQMLSGYREVSRTFTFSVGKLGSIPGLPGRVFNSQVPEWTSNVGYYNKAEYLRVEHAINHEVRGSIAFPISDVDSELPCCAVLELVTTTEKPDFNSELELVCHALKLVNLRTTMPPRLISQCLSNNKRDALTEITDVLRSVCHAHRLPLALTWIPCSYTECTEVEATRIQIKEGHSSSSEKSILCIEESACYIADRAMEGFVQTCIQHHLEEGKGIAGKALQSNHPFFCPDVKAYDISEYPLVHHARKYNLNAAVAIKLRSTYTNDDDYILEFFLPVTVRGSLEQQLLLDNLSGTMQKMCRSLRTVSDAELSGTENSQTGYENKNVFSFSPMSRKKSQIPLVSGNHNSIQNMSLEASNLRNSEIEPSHNQEANESRRQVLKKRTTSEKNVSLSVLQQYFSGSLKDAAKSIGVCPTTLKRICRNNGISRWPSRKINKVNRSLKKIQTVLDSVQGVEGGLNFDPSKGEFVAHKSHLLPKKSTTKDPGPVTEVAVLVPPAPCSESDKSAFKFEITNVHVMGKQLVHSSYELKKANASSVDCSEDSKSMETEYDISLRAEKSERDIVGMDTGMDGDDGVVELNHPSCSSLTNSSNNSSSMIHSSSSASQSFENKEHSKIKSTVADSESKIVVKATYREDTVRFKFDPSSGCSQLYEEIGTRFKLQEGLFQLKYLDDEDEWVMLVNDSDLQECIDIMDDTGTRNVKFLVRDMPCVLSSSGSSSCYLGCSS

SEQ ID NO: 327 - protein, 990 aa, Lupinus angustifolius
MEDPFFLKGKEFGYWTSPQAQVEEGPPSLDGGTRSSISEDMLNNFSELINFDNYAGWCTSPLMNDQSLTNGLSSFASAPYPPLSGFNLVEQNNSPFFMTEDSGNSNTMENSSSYGEKVVFQPMDTQLGFSDYANDTSNLDSNQNFNGSFQQLNTLDVDNYITSKPSGLSLDERMLRALSFFKESAGEGILAQVWVPKKHGDELILTTSEQPYLLDQMLAGYREVSRTFTFSAERKPGSFPGLPGRVFLSQVPEWTSHIGYYNKSEYMRVEDAINHEVRGSIALPISDLQSELPCCAVLELVTTKEKQDFDRELEIVSHALQLVNLRTPMPPRVLPQCLSNNKRAALTEITDVLRAVCHAHKLPLALTWIPCCYSEGMRDGTGRVRIKEGHASSGEKCILCIEESACYINDRMVGGFVHACVEHYLEEGQGIAGKALQSNLPFFYPDVKVCDIGEYPLVHHARKYNLNAAVAIRLRSIYTNDDDYILEFFLPVDMTGSSEQQLLLDNLSGTMQRICRNLRTISDAELSGIEGPQVGFENEKVSGFFSLSRENSHSTMLNGAHDSVQKMSLKASNLRNNGIGAVHNQAMNRSRRQAEKKRSTVEKNVSLSVLQQYFSGSLKDAAKSIGVCPTTLKRICRQHGISRWPSRKINKVNRSLQKIQIVLDSVQGVEGGLKFDPSTGGFVAGGSIIQAIDAHKGLMFPEKWTVKDPESLTKGAVSVLPASRSEDESLVIKLEEEDVSLEGNQLLHSRSVLISNSCDGELKKDNAFSFDCNDYSKSVTVDNESYRTTCPWTKSQDCPDQINPGSFLEKDSGSLNKSSHDIECHNSSSLVADELEIGGAVEHNHPTLSSMTDSSSGSGSTMHGSSSSSQISENQKQSKRKSTCVDSESKIIVKATYREDTIRFKFDPSIGCSQLYAEVATRFKLQNGSFQLKYLDDEKEWVMLVNDSDLQECVEIMGDIDTRSVKFIVRDMPCVVSNHGSNNCLLAEPT

SEQ ID NO: 328 - protein, 985 aa, Lupinus angustifolius
MEDPFFLKGKEFGYWTSPQAQVEEGPPSLDGGTRSSISEDMLNNFSELINFDNYAGWCTSPLMNDQSLTNGLSSFASAPYPPLSGFNLVEQNNSPFFMTEDSGNSNTMENSSSYGEKVVFQPMDTQLGFSDYANDTSNLDSNQNFNGSFQQLNTLDVDNYITSKPSGLSLDERMLRALSFFKESAGEGILAQVWVPKKHGDELILTTSEQPYLLDQMLAGYREVSRTFTFSAERKPGSFPGLPGRVFLSQVPEWTSHIGYYNKSEYMRVEDAINHEVRGSIALPISDLQSELPCCAVLELVTTKEKQDFDRELEIVSHALQLVNLRTPMPPRVLPQCLSNNKRAALTEITDVLRAVCHAHKLPLALTWIPCCYSEGMRDGTGRVRIKEGHASSGEKCILCIEESACYINDRMVGGFVHACVEHYLEEGQGIAGKALQSNLPFFYPDVKVCDIGEYPLVHHARKYNLNAAVAIRLRSIYTNDDDYILEFFLPVDMTGSSEQQLLLDNLSGTMQRICRNLRTISDAELSGIEGPQVGFENEKVSGFFSLSRENSHSTMLNGAHDSVQKMSLKASNLRNNGIGAVHNQAMNRSRRQAEKKRSTVEKNVSLSVLQQYFSGSLKDAAKSIGVCPTTLKRICRQHGISRWPSRKINKVNRSLQKIQIVLDSVQGVEGGLKFDPSTGGFVAGGSIIQAIDAHKGLMFPEKWTVKDPESLTKGAVSVLPASRSEDESLVIKLEEEDVSLEGNQLLHSRSVLISNSCDGELKKDNAFSFDCNDYSKSVTVDNESYRTTCPWTKSQDCPDQINPGSFLEKDSGSLNKSSHDIECHNSSSLVADELEIGGAVEHNHPTLSSMTDSSSGSGSTMHGSSSSSQISENQKQSKRKSTCVDSESKIIVKATYREDTIRFKFDPSIGCSQLYAEVATRFKLQNGSFQLKYLDDEKEWVMLVNDSDLQECVEIMGDIDTRSVKFIVRDMPCVVSNHGSNNCL

SEQ ID NO: 329 - protein, 975 aa, Lupinus angustifolius
MEDPFFLKGKEFGYWTSPQAQVEEGPPSLDGGTRSSISEDMLNNFSELINFDNYAGWCTSPLMNDQSLTNGLSSFASAPYPPLSGFNLVEQNNSPFFMTEDSGNSNTMENSSSYGEKVVFQPMDTQLGFSDYANDTSNLDSNQNFNGSFQQLNTLDVDNYITSKPSGLSLDERMLRALSFFKESAGEGILAQVWVPKKHGDELILTTSEQPYLLDQMLAGYREVSRTFTFSAERKPGSFPGLPGRVFLSQVPEWTSHIGYYNKSEYMRVEDAINHEVRGSIALPISDLQSELPCCAVLELVTTKEKQDFDRELEIVSHALQCLSNNKRAALTEITDVLRAVCHAHKLPLALTWIPCCYSEGMRDGTGRVRIKEGHASSGEKCILCIEESACYINDRMVGGFVHACVEHYLEEGQGIAGKALQSNLPFFYPDVKVCDIGEYPLVHHARKYNLNAAVAIRLRSIYTNDDDYILEFFLPVDMTGSSEQQLLLDNLSGTMQRICRNLRTISDAELSGIEGPQVGFENEKVSGFFSLSRENSHSTMLNGAHDSVQKMSLKASNLRNNGIGAVHNQAMNRSRRQAEKKRSTVEKNVSLSVLQQYFSGSLKDAAKSIGVCPTTLKRICRQHGISRWPSRKINKVNRSLQKIQIVLDSVQGVEGGLKFDPSTGGFVAGGSIIQAIDAHKGLMFPEKWTVKDPESLTKGAVSVLPASRSEDESLVIKLEEEDVSLEGNQLLHSRSVLISNSCDGELKKDNAFSFDCNDYSKSVTVDNESYRTTCPWTKSQDCPDQINPGSFLEKDSGSLNKSSHDIECHNSSSLVADELEIGGAVEHNHPTLSSMTDSSSGSGSTMHGSSSSSQISENQKQSKRKSTCVDSESKIIVKATYREDTIRFKFDPSIGCSQLYAEVATRFKLQNGSFQLKYLDDEKEWVMLVNDSDLQECVEIMGDIDTRSVKFIVRDMPCVVSNHGSNNCLLAEPT

SEQ ID NO: 330-331 - skipped (2 entries)

SEQ ID NO: 332 - protein, 916 aa, Malus x domestica
ASFDGGTSPAATDQIAASLGVPSWPSVTYAPFYALNFVEPNGEQLPVTSGAGTFNVGENFSCGDKIVFDQMGTPQYGVSTDSNEANDSAIKLNNSSFQHNNPMDMESYMIYRPPGLSLNEKMLKALSMFKETSGGGILAQLWVPMKHGDQYLLSTCEQPYLLDHILAGYREVSRMFTFSTEEKQSSILGLPGRVFVSKIPEWTSNVIFYNKTEYLRVDYAANHQVRGSIALPIFDFDMEMSCCAVLELVSTKEKPNFDTEMEVVCGALQAVNLRTNAPLRLLPQCLSENQRAALTEISDVLRVVCHAHLLPLAMTWIPCCYSEGNGDEIKRVCAKGGITNSNEKCILCIEETACYVNDSRMQGFVRACAEHHLEEGEGIAGKALQSNHPFFINDVKVYDICEYPLVHHARKYGLNAAVAIRLRSTYTADDDYILEFFLPVNVKGSTEQQLLLNNLSGTMQKICKSLRTASDAELVGLEGTNTRFQKGLSPNVPQRHSRTTLSDSEMKSAKNVTFNVFNRKNGAIKRDNPPGKAPSGSRRQVEKKRTTTEKNVSLSVLQQYFSGSLKDAAKSIGVCPTTLKRICRQHGISRWPSRKISKVNRSLEKIQTVLDSVQGVDGGLKYDPTTGGFVATGSIIQEVDAPKNILFPEKNLYVENSEPVTQDLVSVSSLSINNGGSLTVKLEKDGSCVPTSHENEVKNQSIPLMPSKPIAIDFGSCDPTNRGTKGSYLAKEVNKWGYTQNSDCHFVSQSSGFLVATDEMDMGVHGNDGIVEYNQHSSSSLTDSSNDFGSIMQGHSSSSQSFEEQKHPQVETTTGENGSKIIVKATYIEDTIRFKFEPSLGCLQLYEEVAKRLKLQSGTFQLRYLDDEEEWVMLVCDADLQECLEILDDIGTRCVKFLVRDVAFGMDSSGSSNFLG

SEQ ID NO: 333 - protein, 980 aa, Manihot esculenta
MENLFSLKEKGKGYWTSPRAQADGMAPSDGGAKNSISEDIFNSFSEFMNFDTYAGWCTSPSATDQMFASYGSSSFQSTPYSTFDALSFAEQSCLTSLVGGNALNAAGTSYSSGDKMAVQQVNVYASDLMDADDLCAKERTGAQRQIEEMANCMISRPVGFSLDEKMLRALSLLRESADGGILAQVWVPMRRGDQYILTTFEQPYLLDQSLAGYREVSRTYTFSAEVTPDLPLGLPGRVFISRVPEWTSSVVYYSIAEYLRGQHARNHKVQGSIALPIFEPPDNVCCAVLELVTVKEKPNFDSEMENVRLALQAVNLRSTAPPQLLPQSLSRNQRAALAEITDVLRAVCHAHSLPLALTWIPCHYMEEAFDEVMKVRVREGNSRSSGKFVLCIERTACYVNDREMQGFVHACSEHYIEEGQGIAGKALQSNHPFFFSDVKAYDITKYPLVHHARKYGLNAAVAIRLRSTYTGDDDYILEFFLPVNMKGSSEQQLLLNNLSGTMQRICKSLRTVSDAELKGGEGSAVDFQKGAISSFPPLSVSITSSQTTSSEAVLNLTDKVPLDASSSKYDAMKSDGPHEQSFNASRRQPEKKRSTAEKNVSLGVLQQYFSGSLKDAAKSIGVCPTTLKRICRQHGISRWPSRKINKVNRSLKKIQTVLDSVQGVEGGLKFDPTTGGFVAAGSIVQEFDSQRIFLSPDKNLPARNSQSATEEAVSVPSVPCIDGSNSAVKVEEDEFCMDTCGEVLMKSSIPVIDCSEDSKSIATDAEICQKGRLGCGPWAAMDNASAFAKGTKGSLNSGSAKVDNSDTHFVSRSSCSLGAAEVLDTKEEGDDVMVEHNQPTCSSMTESSNGSGSMIHGSASSSPSFEEKHLKVKCDDGGSKISVKATYREDTVRFKFEPSAGCFQLYEEVAKRFKLQNGTFQLKYLDDEEEWVMLVTDSDLQECIEILDYVGKRSVKFLVRDSVFTMGSSGSSNCFLGGSS

SEQ ID NO: 334 - protein, 993 aa, Medicago truncatula
MEYPYYSKGGGIGYWQSPGTQFEGPTSLDGGINNLVSEDMPNSFSELMNFDTYAGLCSGPSTTDQIMTNELPSLASALYQLPDGFNPVEPNSGQFYGGNYNNFESSPIFGEKIVCQQMDTLLGFLDNSNDANNSSSRQKFDDPSQHVNAFDMGNYVIARPQALISRPPALSLDERMLKALSFFKESAGGGILAQVWVPIKHDGQVLLSTSEQPYLLDQMLAGYREVSRTFRFSTEGKPGCIPGLPGRVFISKVPEWTSNVGYYNPKEYLRAEHARNHEVRGSIAFPIFDLHSGLPCSAVLELVTTKEKLDFDRELEIICRSLQDLDVSIQRYHGEFCSLASKVSYVFVGDWSLVNLRTTASSRLLPECLSTNKRAALTEIVDVLRSVCYAHRLPLALTWIPCFYTDGTRDETTRIQIKEGNSSSREKNILCIEESACYITDRVMEGFVHACIEHPLEEGNGVAGKALQSNHPFFYSDVKTYDISEYPLVHHARKFNLGAAVAIRLRSIYTNNDDYILEFFLPINMKGSSEQQLLLDNLSGTMQKICKSLRTVSGAEISGMESSVVGFGKKNVPSFPSTSTRNSQVSLINEKDGSVQKLSLDTSNLRNNGNKPSCNQENNGSRRRVEKKRNTSEKNVSLSVLQQYFSGSLKDAAKSIGVCPTTLKRICRHHGISRWPSRKINKVNRSLKKIQTVLDSVQGVEGGLKFDPSSGAFVAGGTTTEEINENKSLLFPERSTTQDSEPMSQNAVSVPSEDENLENKWEGKLKETNTCSIDCSEDSKSFAMDDCPEQAYIGSVLAKCDEWVLNNGGLREEKRKHSTIGQRTSSFAVDEMDTGADGDDDDVVEHNHPTSSSLTDSSNGSGSMIHGSSSGYQNFKNQKPSKGKSTIVDSGSKIVVKATYGEDTIRFKFDPSTGYYKLYEEVAARFKLQDGSFQLKYLDDEEEWVMLVNDSDLQVCLEILNDMGTHNARFLVRDIPCTFGSSGSSSCYLGGSS

SEQ ID NO: 335 - protein, 912 aa, Medicago truncatula
MEGQYSSKERGGISLWTPFDSGMKSSLNSDDMFNNISELMNFDSYAGWCNGSSSITDQTLTNDLSSFAYDGLNLSEHINGPFFMTEIGGNYNVMDSYDEKVLLQEMETQLEFLDNNSNETNNNLDSQQNGSYDMCNYIISKSPSWSLDERMMSALSFFKESAGGGILAQVWAPIKYGDDFILTTSDQPYLLDQKLAGYREVSRSFTFSAEMKMGSCCAGLPGRVFNSHVPEWTSNVGYYHKSEYLRLDHAISHEVRGSIALPISDMNSEVSCCAVLELVTTKEKPNFDKELEFVSHALQRVNLRTIMPPRLLPQCVSSNKRAALTEITDVLRAVCHAHSLPLALTWIPCCYSEGKGEESERIRIKEGHITSSNEKCVLCIEESACYINDKMVGGFVHACSEHHLEEGQGISGKALQSNHPFFYTDVKAYDVSEYPLVHHARKYNLNAAVAIRLRSTYTNDDDYVLEFFLPINMIGSSEQQLLLDNLSDTMRRICKSLRTVSEAELRGMEGSQYEFQKENVSGFFPMSRGNSQIAFSSGDNDLFQMSFNETNLKNSGNQAAYSQATSGSRKQAEKKRSAVEKNVSLSVLQQYFSGSLKDAAKKIGVCPTTLKRICRQHGISRWPSRKINKVNRSLKKIQTVLDSVQGVEGVLKFDPHTGGFVAGGSIIQQIGKHNKTLKFPEKASVPKLEDEDVLVSNSCEVELEKDNAISVDCIEDSTTWLWTKTQDCPKQTTIDYVLEKEQDQCGLDNSSLHDIGSHSSFSMIELGFEEGKGADEHNNPTSSSMTDSSNASGSMVNGSSSGSQSIENQKHSKVKSICVDSESKFAVKANYRGDTIRFKFDPSVGCCQLYEEVAKRFKLQNGSFQLKYLDDEEEWVMLVNDSDLKECVEVLSDIGTHCVKLLVRNIHGGSDS

SEQ ID NO: 336 - protein, 964 aa, Medicago truncatula
MEYPYYSKGGGIGYWQSPGTQFEGPTSLDGGINNLVSEDMPNSFSELMNFDTYAGLCSGPSTTDQIMTNELPSLASALYQLPDGFNPVEPNSGQFYGGNYNNFESSPIFGEKIVCQQMDTLLGFLDNSNDANNSSSRQKFDDPSQHVNAFDMGNYVIARPQALISRPPALSLDERMLKALSFFKESAGGGILAQVWVPIKHDGQVLLSTSEQPYLLDQMLAGYREVSRTFRFSTEGKPGCIPGLPGRVFISKVPEWTSNVGYYNPKEYLRAEHARNHEVRGSIAFPIFDLHSGLPCSAVLELVTTKEKLDFDRELEIICRSLQLVNLRTTASSRLLPECLSTNKRAALTEIVDVLRSVCYAHRLPLALTWIPCFYTDGTRDETTRIQIKEGNSSSREKNILCIEESACYITDRVMEGFVHACIEHPLEEGNGVAGKALQSNHPFFYSDVKTYDISEYPLVHHARKFNLGAAVAIRLRSIYTNNDDYILEFFLPINMKGSSEQQLLLDNLSGTMQKICKSLRTVSGAEISGMESSVVGFGKKNVPSFPSTSTRNSQVSLINEKDGSVQKLSLDTSNLRNNGNKPSCNQENNGSRRRVEKKRNTSEKNVSLSVLQQYFSGSLKDAAKSIGVCPTTLKRICRHHGISRWPSRKINKVNRSLKKIQTVLDSVQGVEGGLKFDPSSGAFVAGGTTTEEINENKSLLFPERSTTQDSEPMSQNAVSVPSEDENLENKWEGKLKETNTCSIDCSEDSKSFAMDDCPEQAYIGSVLAKCDEWVLNNGGLREEKRKHSTIGQRTSSFAVDEMDTGADGDDDDVVEHNHPTSSSLTDSSNGSGSMIHGSSSGYQNFKNQKPSKGKSTIVDSGSKIVVKATYGEDTIRFKFDPSTGYYKLYEEVAARFKLQDGSFQLKYLDDEEEWVMLVNDSDLQVCLEILNDMGTHNARFLVRDIPCTFGSSGSSSCYLGGSS

SEQ ID NO: 337 - protein, 1287 aa, Mucuna pruriens
NASEHGSNVSSKFLHRGTLTLVKLQLILIFNLSMEYPFPPKGSGIGDWQSSRAQLEGSTSLDGGMSNSISEDVPNSFSELMNFDSYAALCNSPSLTDQILANELPSFASLSYPLPDGFNLVQENSEQCYMSGVGRNNNDMENSPIYGEKVVCQQMDTLLGFVNDTNDANNLNSKLKINVPSQNLNTSDTGNYTMSRQPGLLLDERMLRALSFFKESAGGGILAQVWVPIKHGDQLILSTTEQPYLLDEMLAGYREVSRTFTFSAEGESGCFLGLPGRVFTSKAPEWTSNVEYYSMSEYSRVKHAIYHKVRGSIAFPIFDLHSEMPCCGVLELVTTKEKPDFDRELEIVCRALQHVNLRTAKPLRSFPQCLSNNKKATLTEIVDVLRSVCHAHRLPLALTWIPCCYIEGLRGEATRIQIKEAHSTSSGKKILCIEESACYVTDRAMAGFVRACMEHHLEEGKGIAGRALQSNHPFFYPDVKAYDISEYPLVHHARKYNLNAAVAIRLRSTCTNDDDYILELFLPVNMRGSSEQQLLLDNLSGTMQRICRSLRTVSTAELSGIGSSQEGFGKKNVPGFFPLSSRNSQIPLINGDHDSVQKMSLKETNLRNNEIEPSPNQEKNGSKRQVQKNRSTSEKNVSLSVLQQYFSGSLKDAAKNIGVCPTTLKRICRQHGISRWPSRKINKVNRSLKKIQTVLDSVQGVEGGLKFDPSMGAFVAGGSIIQKVDAHKSLLFPEKSTIKDPALVTQDAFSVPPAPCGEGESFSIKLEGKLKKTNAFSVDGSEDSKSMSIDDGSFQTASLCPKVQDCPGLACLGSVLAKEQDKRILNKGGLSVEKFKHNIVGQSSSSLIGDEMDIGVDGDDGVVEPNHPTSSSLIDSSNGSGSMMHSSSSGSQSFENQNQSKVKSTIVDSGSKLIVKAIYREDTIRFKFDPSAGCFRLYEEVAARFKLQNGSFQLKYLDDEEEWVMLVNDADLQECIEILDDIGKRSVRFLVRDMPCVLSSSGTNSPPPKPWEQAGSSSGSAPFRPASAGNTSDVVEASGTAKPGEIVSSSDRNATVNRNSLGRPVPARPWEQNYGNSSYGGYGSTSALNYNSGYGSGMYGSYGGLGGGMYGGGGVYGNSMYRGGYGGLYGSSGMYGGGMYNSGFGGPMGGYGMGGGPYGEQDPNNPFGGPPSPPGIWISVLRVMQGVVNFFGRISILIDQNTQAFHLFMTALLQLFDRSGLLYGELARFALRLLGIRTKSKTVNPSGPNGQPLPGPHNSSGNVNYIEAPKAAPSAPWDNVWGNDANQ

SEQ ID NO: 338 - protein, 1296 aa, Mucuna pruriens
KPLVQIFIQRDSNIDQISTSNFFFNLIMEDHFSPNGKEIGYCTPSGDQLEESTSEDGGMKNSSSDDMFNNFSEIMNFDTYAGWSNSPSITDQSWANVLSSFSSAPYPLPDGLNLVEHSNGSFFMTEVSEIHNGMESSPSSGDRVIFQQMDIQLGFLDEANDASNFDSKHKLNGTSQQLNNTSDMCNYIISRSSGRSLDDRMLRALSFFMESADGGMLAQVWVPIKHGDEFILSTSEQPYLLDPKLAGYREVSRAFTFSAEGKPGSCPGLPARVFRSHVPEWTSNVGYYNKTEYLRLEHAMNHEIRGSIALPISDVHSQVPCAVLELVTTKEKANFDREFEIVSHALQVDFCFAVSSIYFNFLIYVTIEGTNDRCPYDDFMQLVNLRTAMPPRLLPQCLSSNKRAALTEIIDVLRAVCHAHRLPLALTWIPCCYSEGIGEETERIRIKEGHKSSNEKCVLCIEESACYVNDRAIGGFVHACLEHYLEEGQGIAGKALLSNHPFFYTDVKTYDIGEYPLVHHARKYNLNAAVAIRLRSTYTNDDDYIIEFFLPVNMTGSSEQQLLLDNLSGTMRRICRSLRTVSDAELTRIQGFQSEFPKENVPSFFPMSTRNSEIAFINDDHDLVQKMSLKASNMRNNGIEAAHSQAMNGSRKQVEKKRSTVEKNVSLSVLRQYFSGSLKDAAKSIGVCPTTLKRICRQHGISRWPSRKINKVNRSLKKIQIVLDSVQGVEGGLKFDPYTGGFIAGGSIIQETESHKYLLFPEKSSVKDPKPTTQKAASVVSAPGSTSDNSTIKLDDNDGVCLMGNPLVHPRSVLISNNTSEGELKKDNVSSDDCCEDSKSVAMNDASCKKACLWTKTQDCPEQTCSISLVTDEVEVEVGVHEGEGADEHNHPTSSSTTNSSNGFGSMMHGSSSCSQSFENQKHSRVTPSCVDSGSKIIVKASYRGDTIRFKFDPSAGCFQLYEEVATRFKLQNGSFQLKYLDDEEEWVMLVNDSDLQECTEILDDIGTRCVKFLVRDVPCVLSSRGSNTPPKPWEKAPTPASGAAPFKPPSAGSTSDVVEASGTARPGEIVSASDKIATVNRNALGKPLPTRPWEQNYGSSSFGGYSSTMNYNSGYGSYGGVGGGMYGGGMYGNNMYRGGYGGLYGSSGMYGGGMYNGGFGGPMGGYGMGGGPYGVEDPNNPYGAPPSPPGFWISVLRVMQGVVNFFGRISILVDQNTQAFHLFMTALLQLFDRSGVLYGELARFVLRLLGIRTKPKKINPPGPDGLPLPGPHNMEGTKAAPSGSWDNVWENDTKK

SEQ ID NO: 339 - protein, 936 aa, Oryza sativa
MDMPTPSNRAGCNGNTGGTMGPSDDPYGAAAMNLDCYSEIYSPSVADQLFSLLNDPAAHRMFAMWPSMGSSPCAAGTSEDMPLDAYSGLGEAVEEPSQIMSVNPTEAEKTGKSSGELGSDDGAHQGSSMVPRSVVGSSLADRMLMALSLFRESLGSGALAQVWMPVEQEGHVVLSTCEQPFLLDQVLAGYREVSRHFVFSAKEEPGLQPGLPGRVFISGVPEWTSSVLYYNRPEYLRMEHALHHEIRGSLAMPIYDPSKDSCCAVFELVTRKEKPDFSAEMDNVCNALQAVNLKATKGSSNQKFYTENQKFAFTEILDVLRAICHAHMLPLALTWVPTSNGIDGGYVVGKDGASFSQSGKTIIRIHESACYVNDGKMQGFLQACARRHLEKGQGIAGRALKSNLPFFSPDIREYSIEDYPLAHHARKFSLHAAVAIRLRSTYTGNDDYILEFFLPVSCKGSGEQQMLLNNLSSTMQRICKSLRTVYEAEVDNVNAGTAAVFRKNNESCLPTGHTESSSHGDQSITGASFEDTSLANKPGVMEPELAEQVQPSSIGHAEKKRSTAEKNISLDVLRKYFSGSLKDAAKSLGVCPTTLKRICRHHGISRWPSRKINKVNRSLKKIQTVINSVHGVDRSLQYDPATGSLVPVVSLPEKLTFPSCDGLPTPSVGKTVEENSDLKSEEGCSLPDGSQRQSCQLQISDVKKSNEDEFHIGSGNSDFYGANATAKSNSEVTQGPLCPTGAFSALHLKGTDCTNPSSSLRPSSESTRNQIVGRNSPSIQQEDLDMLDNHEAEDKDHMHPSTSGMTDSSSGSASSHPTFKQNTRSALKDAASPALTVKATYNGDTVRFKFLPSMGWYHLLEEIAKRFKLPTGAYQLKYKDDEDEWVILANDSDLQECVDVLDSIGSRIVKLQVRDLPCIVSSSGSSTCLQLAAHSS

SEQ ID NO: 340 - protein, 886 aa, Oryza sativa
MDMLMLSSALDGLDSYTDLVAGSSVADSIFSALTCFPPSQERLLHVSTPVGSNSRQDDSDVSITKEGTTTRRGDCAAGLASGEPVAAGIGSVPKPFDGVTLTERMLRALAMLKEASGGEAILVQVWMPVRNGEQHVLTTSDQPFLLDQKLTGYREVSRQFTFSAEEGPGLFPGLPGRVFMSGMPEWTSNVMYYHGSEYLRVDYARRHEVRGSLAMPVFNSSGGSCCAVLEVVMTREKDNFCLEMVNVSNALQSVQLSTVNAWRHSQSYSRDQKLALMEIFDVLQAVCQAHLLPLALAWIPVCSKRDVLVSVEYGANFGKRNKEVLCIEESACYVNDTRMRDFVQVCAEHPLEKGQGVAGNAYLSNNPFFSSDVKDYDMHAYPLVNHARKFGLHAAVAIRLQSTYTKNDDYVLEFFLPVLCKGGGEQQLLLDSISATMRRVCKSLRTVSDAELKEDVTRKPSNENRSGTRCPSPVNLIYSGREIDVSNETKTNTPLEYQIEGIDEQLSDTKSTNKLIKCSNASDGEKRRSSTEKSVSLSVLQQYFSGSLKDAAKSIGVCPTTLKRICRQHGISRWPSRKIKKVNRSLKKIQNVISSVHGVEGVLKYDPSTGCLVSSVSPSIEPVLMNVEHKGSDPLPIESELPHLNFEPDCDAYRREHAGQDVLHKLQNKQNGEINFDMDDGELFRNSHSTRTLSGAFCEDMPNGLYVAREMTCVAKTGTRTERLEHKPSSRDSFSAPQEYRMESETDKSNKNSKQSLPSSSSMTDCSTSSGETFKSIKSQSANESNKTVVVKASYKNDTIRFKLLPSMKYEQLLEEIAKRLKLSIGLFQLKYKDDEGDWVILASDADLQECLEILDTTRLRILKLQVQDVVCPIGSSSGSCSMLRP

SEQ ID NO: 341 - protein, 951 aa, Parasponia andersonii
MEHPFSSKEKENEYWSSSRAQVENLASFDGVPRGMLPEDVFNSFSELLTFDAYAGWSNSPAVTDQVSATYGLSSLPSTTYVPMDGSNFAEQNVGALPVTEVGGNFNLPRSSFNYGDKIVFQPVNSEMGMVDSTICRPTRYSLDERMLRALSFVKESSGGGILAQVWVPVKHGDQLFLSTSEQPYLLDHMLAGYREVSRMYTFAAEGKPGCFPGLPGRVFISKIPEWTSDVGYYKKNEYVRVEHAYNHQVRGSLALPVFESDPGMPCCAVLEIVTTKEKPNFDTEMEIVCHALQAVNLRTNPPPRLVHQCLSKNQKDALAEIIDILRAVCHAHRLPLALTWIPCCYGEGAAGELAGVHVREGKTSSSEKCILCIEKSACYVNDSLMQGFAHVCVEHHLEEGQGLAGKALQSNLPFFFPDVKTYDISEYPLVHHARKFGLNAAVAIRLRSTYTGDCDYILEFFLPVNMKGASEQQLLLNNLSGTMQRICKSLRTVSDVEVGAIPSDAFQKGSVPNFMSLPGESSQMVLSDSDLNPTDELPLKVSNRRNEGIEADGVHEQAIRGSRRQTEKKRSTAEKNVSLNVLQQYFSGSLKDAAKSIGVCPTTLKRICRQHGISRWPSRKINKVNRSLRKIQTVLDSVQGVEGGLKFDPTTGGLVAAGSIAQELDAKKSLFFIEKTSSLQNSDPMSAVKLEEDECCTGGVDPNSGEIRKPNIVSLTNSTKDSKIAIEAGSRLPICDARSGALSDKACLGSYHAKEGKTSCQSKCSSKFENSKYYHVSQSSGSLGVCDEMDTAGDGDDELIEHNLPASSSMTDSSNGCGSMLHVSSSSSHSQSFEERKHPKGKMSCGDSGSKIIVKATYREDTVRFKFDTSAGCSQLYEEVAKRFKLQTGTFQLKYLDDEEEWVMLVSDMDLQECLEILDDIGTQSVKFQVRDMPCAVGSSGSSNCFLAGGS

SEQ ID NO: 342 - protein, 951 aa, Parasponia rigida
MEHPFSSKEKENEYWSSSRAQVENLASFDGVPRGMLPEDVFNSFSELLTFDAYAGWSNSPAVTDQVSATYGLSSLPSTTYVPMDGSNFAEQNVGALPVTEVGGNFNLPRSSFHYGDKIVFQPVNSEMGMVDSTICRPTRYSLDERMLRALSFVKESSGGGILAQVWVPVKHGDQLFLSTSEQPYLLDHMLAGYREVSRMYTFAAEGKPGCFPGLPGRVFISKIPEWTSDVGYYKKNEYVRVEHAYNHQVRGSLALPVFESDPGMPCCAVLEIVTTKEKPNFDTEMEIVCHALQAVNLRTNPPPRLVHQCLSKNQKDALAEIIDILRAVCHAHRLPLALTWIPCCYGEGAAGELAGVHVREGKTSSSEKCILCIEKSACYVNDSLMQGFAHVCVEHHLEEGQGLAGKALQSNLPFFFPDVKTYDISEYPLVHHARKFGLNAAVAIRLRSTYTGDCDYILEFFLPVNMKGASEQQLLLNNLSGTMQRICKSLRTVSDVEVGAIPSDAFQKGSVPNFMSLPGESSQMVLSDSELNPTDELPLKVSNRRNEGIEADGVHEQAIRGSRRQTEKKRSTAEKNVSLNVLQQYFSGSLKDAAKSIGVCPTTLKRICRQHGISRWPSRKINKVNRSLRKIQTVLDSVQGVEGGLKFDPTTGGLVAAGSIAQELDAKKSLFFIEKTSSLQNSDPMSAVKLEEDECCTGGVDPNSGEIRKPNIVSLTNSTKDSKIAIEAGSRLPICDARSGALSDKACLGSYHAKEGKTSCQSKCSSKFENSKYYHVSQSSGSLGVCDEMDTAGDGDDELIEHNLPASSSMTDSSNGCGSMLHVSSSSSHSQSFEERKHPKGKMSCGDSGSKIIVKATYREDTVRFKFDTSAGCSQLYEEVAKRFKLQTGTFQLKYLDDEEEWVMLVSDMDLQECLEILDDIGTQSVKFQVRDMPCAVGSSGSSNCFLAGGS

SEQ ID NO: 343 - protein, 951 aa, Parasponia rugosa
MEHPFSSKEKENEYWSSSRAQVENLASFDGVPRGMLPEDVFNSFSELLTFDAYAGWSNSPAVTDQVSATYGLSSLLSTTYVPMDGSNFAEQNVGALPVTEVGGNFNLPRSSFNYGDKIVFQPVNSEMGMVDSTICRPTRYSLDERMLRALSFVKESSGGGILAQVWVPVKHGDQLFLSTSEQPYLLDHMLAGYREVSRMYTFAAEGKPGCFPGLPGRVFISKIPEWTSDVGYYKKNEYVRVEHAYNHQVRGSLALPVFESDPGMPCCAVLEIVTTKEKPNFDTEMEIVCHALQAVNLRTNPPPRLVHQCLSKNQKDALAEIIDILRAVCHAHRLPLALTWIPCCYGEGAAGELAGVHVREGKTSSSEKCILCIEKSACYVNDSLMQGFAHVCVEHHLEEGQGLAGKALQSNLPFFFPDVKTYDISEYPLVHHARKFGLNAAVAIRLRSTYTGDCDYILEFFLPVNMKGASEQQLLLNNLSGTMQRICKSLRTVSDVEVGAIPSDAFQKGSVPNFMSLPGESSQMVLSDSDLNPTDELPLKVSNRRNKGIEADGVHEQAIRGSRRQTEKKRSTAEKNVSLNVLQQYFSGSLKDAAKSIGVCPTTLKRICRQHGISRWPSRKINKVNRSLRKIQTVLDSVQGVEGGLKFDPTTGGLVAAGSIAQELDAKKSLSFIEKTSSLQNSDPMSAVKLEEDECCTGGVDPNSGEIRKPNLVSLTNSTKDSKIAIEAGSRLPICDARSGALSDKACLGSSHAKEGKTSCQSKCSSKFENSKYYHVSQSSGSLGVCDEMDTAGDGDDELIEHNLPASSSMTDSSNGCGSMLHVSSSSSHSQSFEERKHPKGKMSCGDSGSKIIVKATYREDTVRFKFDTSAGCSQLYEEVAKRFKLQTGTFKLKYLDDEEEWVMLVSDMDLQECLEILDDIGTQSVKFQVRDMPCAVGSSGSSNCFLAGGS

SEQ ID NO: 344 - protein, 968 aa, Phaseolus vulgaris
MEDHFCPKGNETGYCTSPGAQLEESTSVDGGMKKSASEDMFSNFSELMNFDTYAGWNNSSCMTYQSLANVFSSFSSASYPPSEGLNLVEHGNGPCFMTEVSEIHSGMESSPSCEERGIFQQMDIQLGFLDEANDSNSFDSKQNRNGTYQQLNTSDMCNYLISRSSGRPLDDRILRALSFFMESVDGEMLAQVWVPIKHGDEFILSTSEQPYLLDPKLAGYREVSRAFTFSAEGKKGSCPGLPARVFISHVPEWTSNVGYYNKTEYLRLDHALNHEIRGSIALPISDLHSLVPCAVLELVTTKEKPNFDRELEIVTHALQLVNLKTITPPRLLPQSLSSNKRAALTEILDVLRAVCHAHRLPLALTWIPCSYSEGLGDESERIQIKEGHTSSNEKCVLCIEESACYINDGALGGFVHACVEHHLEEGQGIAGKALQSNHPFFYTDVKTYDIGEYPLVHHARKYNLNAAVAIRLRSTYTNDDDYILEFFLPVTMTGSSEQQLLLDNLSGTMRRICRSLRTVSDAELTGIEGSVAEFPKEKATYFFPMSKRNSQIAFINDDHDSVQKMSLKASNNGIEAVHSQVVNGSRKQIEKKRSTVEKNVSLSVLQQYFSGSLKDAAKSIGVCPTTLKRICRQHGISRWPSRKINKVNRSLKKIQTVLDSVQGVEGGLKFDPYTGGLIAGGSIMQEIDTHKYILFPEKSAVKDPKHATQKPVSVVPAPGSTSENSTIKLDNDDGVCLVGNKLVHSRSVLISDTSEGGLKKDNASSDDCCEDSKSVAMNDGSSQKGSKRAKNQDCPDQTCSISLVTDEVEVGVDGGEGIDEHNHLNSSSTTHSSNGSGSMMHGSSSRSQSFENQKHSKVKSTCVHSGSKMIVKASYRGDTIRFKFDPSAGCFQLYDEVATRFKLQNGSFQLKYLDDEEEWVMLVNDSDLQECIEILDDIGTRCVKFLVRDVPCVLSSRGSNNCFLSDSS

SEQ ID NO: 345 - protein, 978 aa, Phaseolus vulgaris
MEYPFSSKGREIGDWQSSGTQLVGSTSLDARMSNSISEDMSNSFSELMSFDTYAGLCNSPSISDQILANELPSFASLSYSLPDGFNIVQQNNGQCYMSEVGRNNNDMESSPIYGEKVACQQMDTLLGFLSDANEANNLNSKLKVNGSPQHLNNSVAGNYIMSRPPALSLDERMLRALSFFKESAGGGILAQVWVPIKDGDQLILSTSEQPYLLDQMLAGYREVSRTFTFSAEGKSDCFLGLPGRVFTSKVHEWTSNVGYYSMNEYLRFEHAVNHHVRGSIAFPIFDVHSELSCCAVLEIVTTKEKPDFSREFEIVCRALQLVNLRTVKPLRCLPQCLSNNKKATLTEIVDVLRSVCHAHRLPLALTWLPCCYTEGSRGEATRIIKGGHSTNSGKSILCIEESACYITDRALEGFVRACTEHPLEEGKGIAGKALRSNHPFFCPDVKTYDVSEYPLVHHARKYNLNAAVAIRLRSTYTNNDDYILEFFLPVNMKGGSEQQLLLDNLSGTMQRICSSLRTVSDIELSRIESSQEGFGKKNAPCFSPLSSRNSEVPLENGDCHSVPMMSLKATNARDNEIEPSTHQGRNGTKRQVQKNRSTSEKSVSLSVLQQYFSGSLKDAAKNIGVCPTTLKRICRQHGISRWPSRKINKVNRSLKKIQTVLDSVQGVEGGLKFDPSMGAFVAGGSTIQETDAHKSLLFPEKSIVKDATPITQKSVSVPPAPCSEVENFAFKLDEKLKKTNAFSVGCSEDSKSMAIDDGSCKMERLCIKVQDCPEQACLGSVFPKEQDKWILNKSGLGVENFKSSIRGQSSNSLFGNQMHIGVDGDAGVIEPNHPSSSSLTDSSNGSGSMMHSISSGSQSFKNQNQSNVKSTIVDSGSKLIVKAIYREDTIRFKFDRSAGCFSLYEEVAARFKLQTGSFQLKYLDDEEEWVMLVNDADLQECLEILDDIGTCNVRFLVRDLPLILSSSGSSNCYLGGSS

SEQ ID NO: 346 - protein, 959 aa, Prunus avium
MEYPFSPKEKGSDHWASSRAQVENLGSLDVGTRNSISEDMFNNISELMNFDTYAGWCSPAAMDQISASFGVPSCPSVTYVPLDALNFAEQNGGALPGTEGGETFNVGESSFSGEDKIVFQQMDTPQFGVSTDSHDANDLAAKLNNGSFQQNNVMEVGKYMISRPPGLSLNEKMLKALSLFKESSGGGILAQLWVPMKYGDHYLLSTCEQPYLLDHILAGYREVSRTFTFSAEEKQGSVLGLPGRVFVSKVPEWTSNVSYYNKAEYLRVDHAVNHQVRGSIALPVFNFDSEMSCCAVLELVSTKEKPNFDAEMEIVCNALQAVNLRTTVPPRLLPQCLSMNQRAALAEITDVLRAVCHAHILPLALTWIPCCYSEGDGDEIRRVRVRGGITNSNEKSILCIEETACYVNDRTMQGFVHACVEHHLEEGEGIAGKALQSNHPFFLHDVKVYDIYEYPLVHHARKYGLNAAVAIRLRSTYTGDDDYILEFFLPVNVKGSSEQQLLLNNLSGTMQKMCKSLRTVSDAELAGVQGCNTGVQKGPIPNIPQQRNSQTTSSDSEFNSMENMPSDVLNRRNGGIEAENPREQAPGSRRQMEKKRSTAEKNVSLSVLQQYFSGSLKDAAKSIGVCPTTLKRICRQHGISRWPSRKINKVNRSLKKIQTVLDSVQGVEGGLKYDPTTGGFVATGSIIQEFDAQKSRLFPEKSLPVQNSELVTQDPVPVPSVSCNNGESFAIKLEEDGCCIPTSHEEGVKKQNIPLMPQRDSKPIAIEGNKWGHSKNSLKLENSDCHFVSQSSSSLAAADDMDTGVDGDDGIVEYNQHTSSSLTDSSNCSGSTLRSSSSQSFEEQKQPNMNASSVENGSKIIVKATYKEDTIRFKFDPSVGCFQLYEEVAKRLKLQNGTFQLKYLDDEEEWVMLVSDADLRECLEILDDIGTRSVKFMVRDTPFGVGSSGSSNCFLAGGI

SEQ ID NO: 347 - protein, 991 aa, Prunus avium
MEYPFSPKEKGSDHWASSRAQVENLGSLDVGTRNSISEDMFNNISELMNFDTYAGWCSPAAMDQISASFGVPSCPSVTYVPLDALNFAEQNGGALPGTEGGETFNVGESSFSGEDKIVFQQMDTPQFGVSTDSHDANDLAAKLNNGSFQQNNVMEVGKYMISRPPGLSLNEKMLKALSLFKESSGGGILAQLWVPMKYGDHYLLSTCEQPYLLDHILAGYREVSRTFTFSAEEKQGSVLGLPGRVFVSKVPEWTSNVSYYNKAEYLRVDHAVNHQVRGSIALPVFNFDSEMSCCAVLELVSTKEKPNFDAEMEIVCNALQAVNLRTTVPPRLLPQCLSMNQRAALAEITDVLRAVCHAHILPLALTWIPCCYSEGDGDEIRRVRVRGGITNSNEKSILCIEETACYVNDRTMQGFVHACVEHHLEEGEGIAGKALQSNHPFFLHDVKVYDIYEYPLVHHARKYGLNAAVAIRLRSTYTGDDDYILEFFLPVNVKGSSEQQLLLNNLSGTMQKMCKSLRTVSDAELAGVQGCNTGVQKGPIPNIPQQRNSQTTSSDSEFNSMENMPSDVLNRRNGGIEAENPREQAPGSRRQMEKKRSTAEKNVSLSVLQQYFSGSLKDAAKSIGVCPTTLKRICRQHGISRWPSRKINKVNRSLKKIQTVLDSVQGVEGGLKYDPTTGGFVATGSIIQEFDAQKSRLFPEKSLPVQNSELVTQDPVPVPSVSCNNGESFAIKLEEDGCCIPTSHEEGVKKQNIPLMPQRDSKPILEEDGCCIPTSHEEGVKKQNIPLMPQRDSKPIAIEGNKWGHSKNSLKLENSDCHFVSQSSSSLAAADDMDTGVDGDDGIVEYNQHTSSSLTDSSNCSGSTLRSSSSQSFEEQKQPNMNASSVENGSKIIVKATYKEDTIRFKFDPSVGCFQLYEEVAKRLKLQNGTFQLKYLDDEEEWVMLVSDADLRECLEILDDIGTRSVKFMVRDTPFGVGSSGSSNCFLAGGI

SEQ ID NO: 348 - protein, 959 aa, Prunus mume
MEYPVTPKEKGSDHWASSRAQVENLGSLDVGTRNSISEDMFNNISELMNFDTYAGWCSPAAMDQISASFGVPSCPSVTYAPLDALNFAEQNGEALPGTEGGETFNVGGSSFSCEDKIVFQQMDNPQFGVSTDSHDANDLAAKLNNGSFQQNNVMDVGKYMISRPPGLSLNEKMLKALSLFKESSGGGILAQLWVPVKYGDHYLLSTCEQPYLLDHILAGYREVSRTFTFPAEEKQGSILGLPGRVFVSKVPEWTSNVSYYNKAEYLRVDHAVNHQVRGSIALPVFNFDSEMSCCAVLELVSTKEKPNFDTEMEIVCNALQAVNLRTTLPPRLHPQCLSMNQRAALTEITDVLRAVCHAHILPLALTWIPCCYSEGDGDEIRRVRVRGGITNSNEKSILCIDETACYVNDRTMQGFVHACVEHHLEEGEGIAGKALKSNHPFFLHDVKVYDIYEYPLVHHARKYGLNAAVAIRLRSTYTGDDDYILEFFLPVNVKGSSEQQLLLNNLSGTMQKMCKSLRTVSDAELAGVQGSNTGFQKGPIPNSPQQRNSQTASSDSELNSIENMPSDVFNRRNVGIEAENPREQAPGSRRQMEKKRSTAEKNVSLSVLQQYFSGSLKDAAKSIGVCPTTLKRICRQHGISRWPSRKINKVNRSLKKIQTVLDSVQGVEGGLKYDPTTGGFVATGSIIQDFDAQKSRLFPEKSLPVQNSELVTQDPVPVPSVSCNNGESLAIKLEEDGCCIPTSHEEGVKKQNIPLMPQRDSKPIAIEGNKWGHSKNSLKLENSDCHFVSQSSSSLAAADDMDTGVDGDDGIVEYNQHTSSSMTDSTNCSGSTLRSSSSQSFEEQKQPNMNASSVENGSKITVKATYKEDTIRFKFDPSVGCFQLYEEVAKRLKLQNGTFQLKYLDDEEEWVMLVSDADLRECLEILDDIGTRSVKFMVRDTPFGVGSSGSSNCFLAGGL

SEQ ID NO: 349 - protein, 956 aa, Prunus persica
MEYPFSPKEKGSDHWASSRAQVENLGSLDVGTRNSISEDMFNNISELMNFDTYAGWCSPAAMDQISASFGVPSCPSVTYAPLDALNFAEQNGEALPGTEGGETFNVGGSSFSCEDKIVFQQMDTPQFGVSTDSHDANDLAAKLNNGSFQQNNVMDVGKYMISRPPGLSLNEKMLKALSLFKESSGGGILAQLWVPVKYGDHYLLSTCEQPYLLDHILAGYREVSRTFTFPAEEKQGSILGLPGRVFVSKVPEWTSDVSYYNKAEYLRVDHAVNHQVRGSIALPVFNFDSEMSCCAVLELVSTKEKPNFDTEMEIVCNALQVSFSIHVIYCLQCLSMNQRAALTEITDVLRAVCHAHILPLALTWIPCCYSEGDDDEIRRVRVRGGITNSNEKSILCIEETACYVNDRTMQGFVHACVEHHLEEGEGIAGKALQSNHPFFLHDVKVYDIYEYPLVHHARKYGLNAAVAIRLRSTYTGDDDYILEFFLPVNVKGSSEQQLLLNNLSGTMQKMCKSLRTVSDAELAGVQGSNTGVQKGPIPNSPQQRNSQTTSSDSELNSIENMPSDVFNRRNGGIKAENPREQAPGSRRQMEKKRSTAEKNVSLSVLQQYFSGSLKDAAKSIGVCPTTLKRICRQHGISRWPSRKINKVNRSLKKIQTVLDSVQGVEGGLKYDPSTGGFVATGSIIQEFDAQKSRLFPEKSLPVQNSELVTQDPVPVPSVSCNTGESLAIKLEEGGCCIPTSHEEGVKKQNILLMPQRDSKPIAIEGNKWGHSKNSLKLENSDCHFVSQSSSSLAAADDMDTGVDGDDGIVEYNQHTSSSMTDSTNCSGSTLRSSSSQSFEEQKQPNMNASSIENGSKIIVKATYKEDTIRFKFDPSVGCFQLYEEVAKRLKLQNGTFQLKYLDDEEEWVMLVSDADLRECLEILDDIGTRSVKFMVRDTPFGVGSSGSSNCFLAGGL

SEQ ID NO: 350 - protein, 959 aa, Prunus persica
MEYPFSPKEKGSDHWASSRAQVENLGSLDVGTRNSISEDMFNNISELMNFDTYAGWCSPAAMDQISASFGVPSCPSVTYAPLDALNFAEQNGEALPGTEGGETFNVGGSSFSCEDKIVFQQMDTPQFGVSTDSHDANDLAAKLNNGSFQQNNVMDVGKYMISRPPGLSLNEKMLKALSLFKESSGGGILAQLWVPVKYGDHYLLSTCEQPYLLDHILAGYREVSRTFTFPAEEKQGSILGLPGRVFVSKVPEWTSDVSYYNKAEYLRVDHAVNHQVRGSIALPVFNFDSEMSCCAVLELVSTKEKPNFDTEMEIVCNALQAVNLRTTVPPRLLPQCLSMNQRAALTEITDVLRAVCHAHILPLALTWIPCCYSEGDDDEIRRVRVRGGITNSNEKSILCIEETACYVNDRTMQGFVHACVEHHLEEGEGIAGKALQSNHPFFLHDVKVYDIYEYPLVHHARKYGLNAAVAIRLRSTYTGDDDYILEFFLPVNVKGSSEQQLLLNNLSGTMQKMCKSLRTVSDAELAGVQGSNTGVQKGPIPNSPQQRNSQTTSSDSELNSIENMPSDVFNRRNGGIKAENPREQAPGSRRQMEKKRSTAEKNVSLSVLQQYFSGSLKDAAKSIGVCPTTLKRICRQHGISRWPSRKINKVNRSLKKIQTVLDSVQGVEGGLKYDPSTGGFVATGSIIQEFDAQKSRLFPEKSLPVQNSELVTQDPVPVPSVSCNTGESLAIKLEEGGCCIPTSHEEGVKKQNILLMPQRDSKPIAIEGNKWGHSKNSLKLENSDCHFVSQSSSSLAAADDMDTGVDGDDGIVEYNQHTSSSMTDSTNCSGSTLRSSSSQSFEEQKQPNMNASSIENGSKIIVKATYKEDTIRFKFDPSVGCFQLYEEVAKRLKLQNGTFQLKYLDDEEEWVMLVSDADLRECLEILDDIGTRSVKFMVRDTPFGVGSSGSSNCFLAGGL

SEQ ID NO: 351 - protein, 961 aa, Pyrus x bretschneideri
MDYHFLPKDKGNNHWASAGAQVENLASFDGGTTIQIPEDMFNNISELMNFDTYSGWCSPAAMDQVAASLGVPSCTSVTYAPFYALNFVEPNGEQSGAGTFNVGENFSCGDKIVFDQMGTPQYGVSTDSDEANDSAIKLNNSSFQHNNPMDMERYMIYRPPGLSLNEKMLKALSMFKEISSGGILAQLWVPMKHGDQYLLSTCEQPYLLDHILAGYREVSRMFTFSTKGKQSSILGLPGRVFVSKIPEWTSNVIFYNKTEYIRVDYAANHQVRGSIALPIFDFDMEMSCCAVLELVSTKAKANFDTEMEIVCSALQAVNLRTNAPLRLLPQCLSENQRAALTEISDVLRVVCHAHLLPLAMTWIPCCYSEGNGDEIKRVRAKGGITNSNEKCIICIEETACYVNDSRMQGFVHACAEHHLEEGEGIAGKALQSNHPFFINDVKVYDICEYPLVHHARKYGLNAAVAIKLRSTYTGDDDYILEFFLPVNVKGSTEQQLLLNNLSGTMQKICKSLRTASDAELVGLEGTNTRFPQRHSRTTLSDSEMKSAKNVTFNVFNRKNGGIKRDNPPGKAPSGSRRQVEKKRTTTGKNVSLSVLQQYFSGSLKDAAKSIGVCPTTLKRICRQHGIMKWPSRKISKVNRSLEKIQTVLDSVQGVDGGLKYDPTTGGFVATGSIIQEVDAPQNILFPKKNLHVENSEPVTQDLVSVSSLSINNGEILTVKLEKDGSCVPTSHENEVKNQSIPLMPQGDSKPIAIDFGSCDPTNRGTTPDTKGSYLAKEVNNWGYTQNSDCHFVSQSSGFLVATDEMDMGVHGNGGIVEHNQHSSSSLTDSSNGFGSIMQGYSSSSQSFEEHKHPQVETTTGENGSKIIVKATYIEDIIRFKFEPSLGCLQLYEEVAKRLKLQTGTFQLRYLDDEEEWVMLVCDADLQECLEILDDIGTRCVKFLVRDITFGMGSSGSSNFLG

SEQ ID NO: 352 - protein, 979 aa, Pyrus x bretschneideri
MDYHFSPKDKGNDHWASARAQVENLASFDDGTRNPISEDMFNNISELMNFDTYAGWCSPAATDQIAASLGMPSCPSVTYTPLDALNLVEHNGEQLLVTSGAGTFNVGGSFNCGDKIVFEHMGTPQYGVSTDSNDANDSIVKLNNGSFQQNNVMGMEDYMIYRPPGLSLNEKMLKALSMFKETSGGGILAQLWVPMKHGDQYLLSTCEQPYLLDHILTGYREVSRMFTFSAEEKQGSILGLPGRVFVSKTPEWTSNVSFYNKTEYLRVDHAANHQVRGSIALPIFDFDLESSCCAVLELVSTKEKPNFDTEMEIVCSALQAVNLKTNAPLRLLPQCLSKNQRAALTEINDVLRAICHAHLLPLAMTWIPCCYSEGDGDGIKRVRVKGGFTNSDEKCILCIEETACYVNDRRMQGFVHACAEHHLEEGEGIAGKALQSNHPFFMNDVKAYNIYEYPLVHHARKYGLNAAVAIRLRSTYTGDDDYILEFFLPVNVKGSTEQQLLLNNLSGTMQRICKSLRTVSDAELVGLGGANTGFQKETSPNIPERNFQTTLSDSEMNSAENVTFNVFNQRNRGIERVNPPKQAPSGSIRQAEKKRSTAEKNVSLSVLQQYFSGSLKDAAKSIGVCPTTLKRICRQHGISRWPSRKINKVNRSLRKIQTVLDSVQGVEGGLKYDPTTGGFVATGSIIQEVDAPKNLLFPEKNLLIENSESVAQHPISMPSMSYNNGESLTVKLEEDGNCVPTSHEKEVKTQSIPFMPQGDSKPIAMDFGSCDPTNHGITPDLKGSYLAKEVNKWGHIQNSLRLDNSDCHFVSQNSSFLGPADEMDIGVHGDDGIVEYNQHSSSSLTDSSNDFGSTMQGYSSSTQSFEEQKHPQVETSTAENGSKIIVKATYKEDTIRFKFEPSLGCLQLYEEVAKRLKLQNGTFQLKYLDDEEEWVMLVSDADLQECLEILDDIGKRCAKFMVRDIPSGVGSSGSSNFLG

SEQ ID NO: 353 - protein, 963 aa, Pyrus x bretschneideri
MDYHFLPKDKGNNHWASAGAQVENLASFDGGTTIQIPEDMFNNISELMNFDTYSGWCSPAAMDQVAASLGVPSCTSVTYAPFYALNFVEPNGEQSGAGTFNVGENFSCGDKIVFDQMGTPQYGVSTDSDEANDSAIKLNNSSFQHNNPMDMERYMIYRPPGLSLNEKMLKALSMFKEISSGGILAQLWVPMKHGDQYLLSTCEQPYLLDHILAGYREVSRMFTFSTKGKQSSILGLPGRVFVSKIPEWTSNVIFYNKTEYIRVDYAANHQVRGSIALPIFDFDMEMSCCAVLELVSTKAKANFDTEMEIVCSALQAVNLRTNAPLRLLPQVHCLSENQRAALTEISDVLRVVCHAHLLPLAMTWIPCCYSEGNGDEIKRVRAKGGITNSNEKCIICIEETACYVNDSRMQGFVHACAEHHLEEGEGIAGKALQSNHPFFINDVKVYDICEYPLVHHARKYGLNAAVAIKLRSTYTGDDDYILEFFLPVNVKGSTEQQLLLNNLSGTMQKICKSLRTASDAELVGLEGTNTRFPQRHSRTTLSDSEMKSAKNVTFNVFNRKNGGIKRDNPPGKAPSGSRRQVEKKRTTTGKNVSLSVLQQYFSGSLKDAAKSIGVCPTTLKRICRQHGIMKWPSRKISKVNRSLEKIQTVLDSVQGVDGGLKYDPTTGGFVATGSIIQEVDAPQNILFPKKNLHVENSEPVTQDLVSVSSLSINNGEILTVKLEKDGSCVPTSHENEVKNQSIPLMPQGDSKPIAIDFGSCDPTNRGTTPDTKGSYLAKEVNNWGYTQNSDCHFVSQSSGFLVATDEMDMGVHGNGGIVEHNQHSSSSLTDSSNGFGSIMQGYSSSSQSFEEHKHPQVETTTGENGSKIIVKATYIEDIIRFKFEPSLGCLQLYEEVAKRLKLQTGTFQLRYLDDEEEWVMLVCDADLQECLEILDDIGTRCVKFLVRDITFGMGSSGSSNFLG

SEQ ID NO: 354 - protein, 969 aa, Quercus suber
MDYPLSPKEKGTGFWQSPRPQLENSVSFEVSRSLNLEDSLSDLMNFDTDAGWYNSPSATDQILTSYGLSSFPSTPFGVSSDALNFSEQNGGAFPVNEVGGTFNPVGNSFNCGDKLMFDQMDTQYGFSTDSNDANGLATAQNNCSFPQNNVFDMGNCMIPRPLSMSVDEKMLKALSLFKASSGGGILAQVWVPMRLGDQHILSTWEQPYLLDEMLAGYREISRSFVFPTERRSGSFLGLPGRVFISKVPEWTSNVSYYNKVEYLRADHAAQHEVRGSIAVPVFDSPEMSCCAVLELVTTKEKSNFNAELETVCNALQAVKLRTTEPPRLRPQCLSKNQRAALAEIIDVLRAVCHAHRLPLALTWIPCYYTEGAGDEMPRVRVREGNTNSNEKCILCIEETACYVNDRTKEGFVYACLEHHLEEGQGIAGKALQSNHPFFYADVKNYDISEYPLVHHARKFGLNAAVSIRLRSTYTGEDDYILELFLPVNMKGSAEQQLLLNNLSGTMQRICKSLRTVSDAENQNFPLMAMPGENSQLTLSDNDVNSTEKMPLEVSNTRNDIIEPDSLHKQATSGSRRHEKKRSTAEKNVSLSVLQQYFSGSLKDAAKSIGVCPTTLKRICRQHGISRWPSRKINKVNRSLRKIQTVLDSVQGVEGGLKFDPNTGEFMAAGSIIQETVSQKSLFPDKNLCVKNAELATQNAVSVPSAPGFDGMNSLIKLEEDDCSMGLNQVAPSMGKLNTNTCGEELRKSNAVPCQQASLETTSQASPESVSLGSYLVNRGEKYSLNMDSLKLENDCQFVSLSSLAAGDDIDTGINVDDGIVEHNQPSSSGMTDSSNGSSSMIRGSSSSSQSFEEQKYSKVKTSCVDSGSKIIVKATYREDTIRFKFEPSAGCFQLYEEVGKRFKLQNGTFQLKYLDDEEEWVMLVSDSDLQECLEILDDIGTRSVKLLVRDMPCSMNSSGSSNCFLTGGL

SEQ ID NO: 355 - protein, 969 aa, Quercus suber
MDYPLSPKEKGTGFWQSPRPQLENSVSFEVTRSLNLEDSLSDLMNFDTDAGWYNSPSATDQILTSYGLSSFPSTPYGVSSDALNFSEQNGVAFPVNEVGGTFNPVGNSFNCGDKLMFDQMDSQYGFSTDSNDANGLATAQNNCSFPQNSVFDMGNCMIPRPLSMSVDEKMLKALSLFKASSGGGILAQVWVPMRLGDQHILSTWEQPYLLDEMLAGYREISRSFVFPTERRSGSFLGLPGRVFISKVPEWTSNVSYYNKVEYLRADHAAQHEVRGSIAVPVFDSPEMSCCAVLELVTTKEKSNFNAELETVCNALQAVKLRTTEPPRLRPQCLSKNQRAALAEIIDVLRAVCHAHRLPLALTWIPCYYTEGSGDEMPRVRVREGNTNSNEKCILCIEETACYVNDRTMEGFVYACLEHHLEEGQGIAGKALQSNHPFFYADVKNYDISEYPLVHHARKFGLNAAVSIRLRSTYTGEDDYILELFLPVNMKGSAEQQLLLNNLSGTMQRICKSLRTVSDAENQNFPLMAMPGENSQLTLSDNDVNSTEKMPLEVSNTRNDIIEPDSLHKQATSGSRRHEKKRSTAEKNVSLSVLQQYFSGSLKDAAKSIGVCPTTLKRICRQHGISRWPSRKINKVNRSLRKIQTVLDSVQGVEGGLKFDPNTREFMAAGSIIQETVSQKSLFPDKNLCVKNAELATQNAVSVPSAPGFDGMSSLIKLEEDDCSMGLNQVAPSMGKLNTNTCGEELRKSNAVPCQQASLETTSQASPESVSLGSYLVNRGEKYSLNMDSLKLENDCHFVSLSLLAAGDDIDTVIDVDDGIVEHNQPSSSGMTDSSNGSSSMMRGSSSSSQSFEEQKYSKVKTSCVDSGSKIIVKATYREDTIRFKFEPSAGCFQLYEEVGKRFKLQNGTFQLKYLDDEEEWVMLVSDSDLQECLEILDDIGTRSVKLLVRDMPCSMNSSGSSNCFLTGGL

SEQ ID NO: 356 - protein, 961 aa, Solanum lycopersicum
MENGIGFWASPRCSYIDDNVMEIMNLDTCAGIEQIFASYPTFSPINPMSIDYAPFEEQNTETFPCEGVNLMFQQNDDQFCFVESSEEADLVVETGMGKNSSKQNYVTHIVEKCVIPKSPCQSLAERMLKALELFKKSSGEGILAQVWVPMKSGDQYILSTYEQPFLLDQVLSGYREVSRKFTFDLEMKPGSCPGLPGRVFTSRIPEWTSNVMYYKEAEYLRVQYAVDHEVRGSIALPILEDEEYDTLCCAVLELVTVKERPNFDLETSHVCQALQAVNLRSTTPTQFSSQSLSKNQRAALAEVKDVLRAVCHAHRLPLALTWIPRSRGGGGDEIRAHARESIASLDEKSVLCVENTACYVSDKEMQGFLHACMGHDLEEGQGIVGKSLQSNHPFFYPDVKEYHINEYPLVHHARKFGLNAAVAIRLRSILTGDDDYVLEFFLPVDMEGSTEQQLLLNNLSRTMQRICRSLRTLSDAELIGEGGEKCGLQSESVLSPPPIDLSRKSSQQSLLNSTLDLSKAPIDVCDSERAGIEANISHKQTPSVSRKRTEKKRSAAEKHVSLSVLQQYFSGSLKNAAQSIGVCPTTLKRICRQYGISRWPSRKISKVNRSLVKIRTVLQSVQGIEGGLKFDTVTGGIVAATSILQDFDSQKSMLSPCKDVSIKSSEFLFQDAVSALQTSCIDNHDSLVKMEEDLNVDGNQLPESSHFGPSSFRVGDKPNSLLSGVCHGSKLAALDRRSSLPANPDTMPRTSSGNVSLDSFHTKGGWRSCGLNTSNLKLDNSGCHFISLCPDSMAKTDDIEEKMKGSIEVDGDDGVMEHHKVSSSGVTDLSNTSRSTMNGSSSSSHSSGERKHTTAEDGGSQITVKASYVKDKIRFKFEPSAGCFQLYEEVAKRFKLQIGTFQLHYLDDEEEWVMLVNDADLNECLEILDILGTRNVKFLVQDVSGTVGSSGSSNCFLTNGS

SEQ ID NO: 357 - protein, 986 aa, Solanum lycopersicum
MERGVDFWASPKGQMEGVASFDASTRSSNVDSFNNVMEIMNLDAYAGWCTSPSAAEHMLASYAAFSPINHMSQSYAPFEGLSYTEQNSGAFPPMDANMVVSNHDGGEKMMFGQTDDQLHFMVDSVDGEDGLGAKRSRRSSQPSDGADIGNSMIPRSPSQPLAERMLRALAMFKESSAAGILAQVWIPMKNGDQYVLSTCEQPYLLDQVLSGYREVSRKFTFDTEIKPGAIPGLPGRVFSSRIPEWTSNVLYYKEAEYLRVQYAVNHEVRGSIALPVFEDDACETPCCAVLELVTMKEKRNFDLEMDHVCQALQAVNLRSTAPPRLHSQNLSNNQKDALAEITDVLRAVCHAHKLPLALTWIPCNVTEGEGDEPIRVRARGCNTSLNEKCVLCVEDTACYVSDKEMQGFVHACMEHFLEEGEGIVGKALQSNHPFFYPDVKEYHISEYPLVHHARKFGLNAAVAIRLRSTFTGNDDYILEFFLPTSMKGSTEQQLLLNNLSGTMQRICKSLRTVADVELVGQDTKFGLQDGSVPNLPPIALSRKNFQHSLDSNSNSVNEAPLGACDSKSAGTHADDSHEQTMTGSRRQIEKKRSTAEKHVSLSVLQQYFSGSLKDAAKSIGVCPTTLKRICRQHGISRWPSRKINKVNRSLKKIQTVLESVQGVEGGLKFDPASGGLVPAGSITQDFDAQRSIFFPFKDVSVKNPTSVFQDTVSVPSSSGNDKENSMVKMEEDFFADGNQLSQSNHVNTSSFKEVTKSSIEVSGYCYESKLPLTDSGNASLGPFLSKGGCRRWGLNNDTLDNVDCQFTSQCSYSMAVGSDVDSKMKEDNEMDGDGGVIEHNQASSSAMTDSSNGSESMINGSSSSTHSRGAEKHSKIEVNCGDNGSTITVKATYKEDTIRFKFDLSAGCFQLYEDIAKRFKLHTETFQLKYLDEEEEWVMLVNDADLHECLEILDFSGGRTVKFLVRDTPCALGSSGSSNCFLASGS

SEQ ID NO: 358 - protein, 959 aa, Solanum tuberosum
MENGIGFWASPRCSYIDDNVMEIMNLDTYSGIEQIFASYPTFSPINPMSIDYAPFEEQNTETFPCEGENLMFQQNDDQFCFVDSSEEADLVDEMGKNSSKQNYVTDLVEKCVIPKSPCQSLAERMLKALELFKKSSGEGILAQVWVPMKSGDQYILSTYEQPFLLDQVLTGYREVSRKFTFDLEMKPGSCPGLPGRVFTSRIPEWTSNVMYYKEAEYLRVQYAVDHEVRGSIALPILEDDGHDTLCCAVLELVTVKEKPNFDLETSHVCQALQAVNLRSTTPPQFSSQSLSKNQRAALAEVKDVLRAVCHAHRLPLALTWIPRSCRGGGGEIRAHARESITSLDEKSVLCVENTACYVSDKEMQGFLHACMGHDLEEGQGIVGKSLQSNHPFFYPDVKEYHINEYPLVHHARKFGLNAAVAIRLRSVLTGDDDYVLEFFLPVDMEGSTEQQLLLNNLSRTMQRICRSLRTLSDAELVGEGGEKCGLQSESVLNLPPIDLSRKSSGQSLLDSTLDLSKAPIDVCDPERAGIEANISHKQTPSVSRKRTEKKRSAAEKHVSLSVLQQHFSGSLKNAAQSIGVCPTTLKRICRQYGITRWPSRKISKVNRSLVKIRTVLQSVQGIEGGLKFDTVTGGLVAATSILQDFDSQKRTLFPCKDVSIESSEFLFQDAVSALQTSCVDNHDSLVKMEEDLNVDGNQLPESSHFSPSSFRVGDKPNSSLSGVCHGSKLAALDRRSSLPANPDTVPCTSSVNVSLDSFHTKGGWRSCGLNTSNLKLDNSGCHFISRCPDSMANTDDIEKKMKGSIEMDGDDGVMEHNKVSSSGVTDSSNTSRSTMNGSSSSSRSSGERKHTTVEDGGSQITVKASYMEDKIRFKFEPSAGCFQLYEEVAKRFKLQIGTFHLHYLDDEEEWVMLVNDADLNECLEILDILGTRNVKFLVQDVSCTVGSSGSSNCFLTNGS

SEQ ID NO: 359 - protein, 1002 aa, Solanum tuberosum
MERGVDFWASPKGQVEGVASFDASSRSSNVDSFNNVMEIMNLDAYAGWCTSPSAAEHMIASYAAFSPINHMSQSYAPFEGMSYTEQNTGAFPPMDANMVASNHDGGEKMMFGQNDDQLHFMVDSVDGEDGLVAKKSRRSSQQSDGADIGNSMILRSPSQPLAERMLRALAMFKESSAAGILAQVWIPMKNGDQYVLSTCEQPYLLDQVLSGYREVSRKFTFDTEIKPGAIPGLPGRVFSSRIPEWTSNVLYYKEAEYLRVQYAVDHEVRGSIALPVFEDDACETPCCAVLELVTMKEKPNFDLEMDNVCQALQAVNLRSIAPPRLHSQNLSNNQRDALAEITDVLLAVCHAHKLPLALTWIPCNVTEGEGDEPIRVRARGCNTSSNEKCVLCVEDTACYVSDKEMQGFVHACKEHFLEEGEGIVGKALQSNHPFFYPDVKEYHISEYPLVHHARKFGLNAAVAIRLRSTFTGNDDYILEFFLPTSMKGSTEQQLLLNNLSGTMQRICKSLRTVADAELVGQGAKFGLQDGSVPNLPPIALSRKNSQHSLDSNSNSVNGAPLGACDSKSAGTHADDSREQTMTGSRRQIEKKRSTAEKHVSLSVLQQYFSGSLKDAAKSIGVCPTTLKRICRQHGISRWPSRKINKVNRSLKKIQTVLESVQGVEGGLKFDPATGGLVPAGSIIQDFNAQKSIFFPFKDVSVKNPTSVFQDAAVPSSSGNDKENSVVKMEDFYADGNQLSQSNHINTSSFKEGNKSSIEVSGYCYESKLATLDAGSSGLASLNAMPLTDSGNASLGSFLTKEGCRRWGLNNDTLDNFDRHFTSRCSYPMVVGGDVDSKMKGDNEMDGDGRVIEHNQASSSAMTDSSNGSGSGSMINGSSSSSHSRGAEKHSKVEVNCGDNGSTITVKATYKEDTIRFKFDLSAGCFQLYEDVAKRFKLQTGTFQLKYLDDEEEWVMLVNDADLHECLEILEFGGGRTVKFLVRDTPCALGSSGSSNCFLASGS

SEQ ID NO: 360 - protein, 945 aa, Sorghum bicolor
MDVPTPPSRTSCNSNISNIGSPMQSFDDPFGVAAMTSFDGYSELCSPSVADHIFSLLNDPSAAQQMFAMWPSLGSSPRASAAREDMPFDTYPGPVDAAASLAQRINSASALNPTGVDIGLKDSDGLIPNNGSQQGSNIIPRSVGNFLADRMLMALSLFRKSLSDGVLAQVWMPIEHNGRVVLSTSEQPYLLDQDLAGYREVSRSFYFSVKEEPGLHLGLPGRVFISGVPEWTSSVMYYSKPEYLRMEHALLHEIRGSLAMPVYDPSKGSCCAVLELVTNKEKPDFDAEMDIVCDALQAVNLQTTTDRGNQKVYSENQKSAFTEILDVLRAICHAHMLPLALTWVPTSNSITNGFCVQKNIGVDSQPGKAVLRIHETACYVNDAKMQGFLHACAERHLEKGQGIAGRALKSNLPFFSPDIREYSIEDYPLAHHARKFGLHAAVAIRLRSTYTGNDDYILEFFLPVNCKGCGEQQMLLNNLSSTMQRICKSLRTVSETEIENVRATAPMCEKTNGSCLPTGNSESSSHEDQPITESAFQDLSLGDKQGDREPDKARSSSMRVAEKKRSTSEKNFSLDVLRKYFSGSLRDAAMSLGVCPTTLKRICRQHGISRWPSRKINKVNRSLKKIEKVIKSVHGVDRSLQYDPATGSLVPATSLPDKMPFSACDTLPTSSVGKTVEEKSSPKSEQDLSSPDGWQREASQFHVSSIPKRDGDEVQMLANNNKGSRNYASGIASITPHSNSEDTQGPLCPIVAVNYLHTGEPCYINSPTSLHPSMDSIEGQTMGMNSPFVQQADVTMVDGHDTKEQTHPSTSGMTDSSSGSASSQPTFKGNPGHTLLKDRSSPALTVKATYNGDTVRFKFLPTMGWYHLLEEIAKRFKLTTGAFQLKYKDDEDEWVILANDADLQECMDVLDSISSCNMKLQVRDLPCLISSSGSSSCLQVEAHSS

SEQ ID NO: 361 - protein, 951 aa, Trema levigata
MEHPFSSKEKENEYWSSSRAQVENLASFDGVPRGMLPEDVFNSFSELLTFDAYAGWSNSPAVTDQVSATYGLSSLPSTTYVPMDGSNFVEHNVGALPVTEVGGNFNLPRSSFNYGDKIVFQPENSEMGIVDSTICRPTRYSLDEKMLRALSFVKESSGGGILAQVWVPVKRGDQLFLSTSEQPYLLDHMLAGYREVSRMYTFAAEGKPGCFPGLPGRVFISKIPEWTSDVGYYKKNEYVRVEHAYNHQVRGSLALPVFEPDPGMSCCAVLEIVTTKEKPNFDTEMEIVCHALQAVNLRTNPPPRLVPQCLSKNQKDALAEIIDVLRAVCHAHRLPLALTWIPCCYDGGAASELAGVHVREGKTSSSEKCILCVEKSACYVNDSLMQGFAHACVEHHLEEGQGLAGKALQSNVPFFFPDVKTYDISEYPLVHHARKFGLNAAVAIRLRSTYTGDCDYILEFFLPVNMKGASEQQLLLNNLSGTMQRICKCLRTVSDVEVGAISSDAFQKGSVPNFMSLPGESSQMVLSDSDLNSTDELPLKVSNRRNEGIEADGVHEQAIRGSRRQTEKKRNTAEKNVSLNVLQQYFSGSLKDAAKSIGVCPTTLKRICRQHGISRWPSRKINKVNRSLRKIQTVLESVQGVEGGLKFDPTTGGLVAAGSIAQELDTKKSLFFIEKTSSLQNSDPLSAVKLEEDECCTGGVDPNSGEIRQPNIVASTNSTKDSKIAIEAGSRLPICDARSGAFSDKACLASYHAKEGKTSSQSKCSSKFENSKYYHVSQSSGSLGVGDEMDTAGDGDDELIEHNLPASSSMTDSSNGCGSMLHVSSSSSLSQSFEERKHPKGKMSCGDSGSKIIVKATYREDTVRFKFDTSAGCSQLYEEVAKRFKLQTGTFQLKYLDDEEEWVMLVSDMDLQECLEILDDIGTQSVKFQVRDMPCAVGSSGSSNCFLAGGS

SEQ ID NO: 362 - protein, 978 aa, Trema orientalis
MEHPFSSKEKENEYWSSSRAQVENLASFDGVPRGMLSEDVFNSFSELLTFDAYAGWSNSPAVTDQVSATYGLSSLPSTTYVPMDGSNFVEHNVGALPVTEVGGNFNLPRSSFNYGDKIVFQPVDTQFEVSAQSNNANNSIAKHNNGSFQENSEMGLVDSTICRPTRYSLDEKMLRALSFVKESSGGGILAQVWVPVKRGDQLFLSTSEQPYLLDHMLAGYREVSRMYTFATEGKPGCFPGLPGRVFISKVPEWTSDVGYYKKNEYVRVEHAYNHQVRGSLALPVFEPDPGVSCCAVLEIVTTKEKSNFDTEMEIVFHALQAVNLRTNPPPRLVPQCLSKNQKDALAEIIDVLRAVCHAHRLPLALTWIPCCYNEGAASELAGLHVREGKTSSSEKYILCVEKSACYVNDSLMQGFAHACVEHHLEEGQGLAGKALQSNLPFFFPDVKTYDISEYPLVHHARKFGLNAAVAIRLRSTYTGDCDYILEFFLPVNMKGASEQQLLLNNLSGTMQRICKCLRTVSDAEVGAISSDAFQEGSVPNFMSLPGESSQMVLSDSDLNSTDELPLKVSNRRNEGIEADGVHEQAIRGSRRQTEKKRNTAEKNVSLNVLQQYFSGSLKDAAKSIGVCPTTLKRICRQHGISRWPSRKINKVNRSLRKIQTVLDSVQGVEGGLKFDPTTGGLVAAGSIAQELDTKKSLFFIEKTSSLQNSDPLSAVKLEEDECCTGGVDPNSGEIRKPNIVASTNSTKDSKIAIEAGSRLPICDARSGAFSDKACLGSYHSKEGKTSSQSKCSSKFENSKYYHVSQSSGSLGVGDEMDTAGDGDDELIEHNLPASSSMTDSSNGCGSMLHVSSSSSLSQSFEERKHPKGKMSSGDNGSKIIVKATYREDTVRFKFDTSTGCSQLYEEVAKRFKLQTGTFQLKYLDDEEEWVMLVSDMDLQECLEILDDIGTQSVKFQVRDMPCAVGSSGSSNCFLAGGS

SEQ ID NO: 363 - protein, 978 aa, Trema tomentosa
MEHPFSSKEKENEYWSSSRAQVENLASFDGVPRGMLPEDVFNSFSELLTFDAYAGWSNSPAVTDQASATYGLSSLPSTTYVPMDGSSFVEHNVGALPVTEVGGNFNLPSSSFNYGDKIVFQPVDTQFEVSAQSNNANNSIAKHNNGSFQENSEMGLVDSTICRPTRYSLDEKMLRALSFVKESSGGGILAQVWVPVKRGDQLFLSTSEQPYLLDHMLAGYREVSRMYTFATEGKPGCFPGLPGRVFISKVPEWTSDVGYYKKNEYVRVEHAYNHQVRGSLALPVFEPDPGMSCCAVLEIVTTKEKSNFDTEMEIVFHALQAVNLRPNPPPRLVPQCLSKNQKDALAEIIDVLRAVCHAHRLPLALTWIPCCYNEGAASELAGLHVREGKTSSSEKYILCVEKSACYVNDGLMQGFAHACVEHHLEEGQGLAGKALQSNLPFFFPDVKTYDISEYPLVHHARKFGLNAAVAIRLRSTYTGDCDYILEFFLPVNMKGASEQQLLLNNLSGTMQRICKCLRTVSDAEVGAISSDAFQEGSVPNFMSLPGESSQMVLSDSDLNSTDELPLKVSNRRNEGIEADGVHEQAIRGSRRQTEKKRSTAEKNVSLNVLQQYFSGSLKDAAKSIGVCPTTLKRICRQHGISRWPSRKINKVNRSLRKIQNVLDSVQGVEGGLKFDPTTGGLVAAGSIAQELDTKKSLFFIEKTPSLQNSDPMSAVKLEEDECCTGGVDPNSGEIRKPNIIASTNSTKDSKIAIEAGSRPPSCDARSGAFSDKACLGSYHAKEIKTLSQSKCSSKFENSKYYHVSQSSGSLGVGDEMDTAGDGDDELIEHNLPASSSMTDSSNGCGSMLHVSSSSSLSQSFEERKHPKGKMSSGDNGSKIIVKATYREDTVRFKFDTSAGCSQLYEEVAKRFKLQTGTFQLKYLDDEEEWVMLVSDMDLQECLEILDDIGTQSVKFQVRDMPCAVGSSGSSNCFLAGGS

SEQ ID NO: 364 - protein, 571 aa, Trifolium pratense
VHACIEHPLEEGKGVAGKALQSNHPLFYSDVKTYDISEYPLVHHARKFNLNAAVAIRLRSTYTNNDDYILEFFLPINMKGSSEQQLLLDNLSGTMQKICKSLRTVSGAELSEMESSQEGFEKNSVPSFHPSSKRKSPTPFINENHGSVKKLSSKASNPRNNGNEPSPNQNKGPEILNLYDSITLHLCYKGERNGPKRRAEKYRSSSEKNVSLSVLQQYFSGSLKDAAKSIGVCPTTLKRICRHHGISRWPSRKINKVNRSLKKIQTVLDSVEGVEGGLKFDPSVGAFVAKGTAIQEIDENRSLPFPEKSTTEDSEPFSQDAASVPLAHCSDGENSANKLDGKLKETNASLIDCSEDSKSFAMDDCPEQACFGSVLGKGDQWVLNKGGLREEEKCKHNTIGQRTSSFVVYEMDTGVDGDDEAVENNNPASSSLTGSSNSSGSIVHDSSSGYQNLKNQKQSKSKSIIVDSGSKIVVKATYGEDTIRFKFDPATGCLKLYEEVASRFKLQNGTFQLKYLDDEKEWVMLVNDSDLQECLEILNDMGTRNARFLVRDTPCTFGSSGSSVCYLGGSS

SEQ ID NO: 365 - protein, 913 aa, Trifolium pratense
MNMEDQFSSKDNGISFWTPLDNGMKSSITSDDMFNNISELMNFDNYAGWCNGSSSLIDQTLTSDLSSFAYSPHDGLSLVEQINGPFFMTDIGGNYSSTSYEEKVLLQQMETQFAFLDNANETNNNNLDSQFDMCNYVMSKSPSWSLDERMMSALSFFKESAGGGILAQFWVPIKYGDEIVLTTSNQPYLLDQKLAGYREVSRSFTFSAEIKMGACCPGLPGRVFISHVPEWTSNVGYYHKSEYLRLDHAISHEVRGSIALPISDMNSEVSCSAVLELVTTKEKPNFDKELEYVSHALQRMNLRTITPPRLLPQCVSNNKRAALAEIVDVLRAVCHAHRLPLALTWIPCYYSEGKGEESERLRIKEGRTTNSDEKCVLCIEESACYINDKMVEGFVHACSEHHLEEGQGISGKALQSNHPFFYTDVKAYDISEYPLVHHARKYNLNAAVATRLRSTYTNDDDYVLEFFLPIDMIGSSEQQLLLDNLSDTMRRICKSLRTVSEGELRGIEVSQDGFPKENISGFFPMSKGNSQIAFSTGDPDLFQMPLMAANNGIQGSHSQVTSESRKQAEKRRNAVEKNVSLSVLQQYFSGSLKDAAKKIGVCPTTLKRICRQHGISRWPSRKINKVNRSLKKIQTVLDSVQGVEGVLKFDPHTGGFVAGGSIIEQIGTCNKNLMFPEKSSVENSAIKLEDDGVLISNSCEGDLKKDNNASSDDYIQDSTSWLWTKTHECPKQNSIDSVLEKEEDQCGLNNSSLHDIASNSSFSLIELGLDEGKGLDEPNHPTSSSMTDSSNASGSMVRGSSSGSQSIENHKNSKIKSICVDSESKFAVKATFRGDTIRFKFDPCLGCFQLYEEVATRFKLRNGSFQLKYLDDEEEWVLLVNDSDLKECVEVLSDSGTHCVKLLVRDIHGDGNS

SEQ ID NO: 366 - protein, 965 aa, Trifolium subterraneum
MEYPFYPKGRGIGYWQSPGTQLEESRSLDGGISNLVSEDMPSSFSELMNFDTYAGLCSGPSMTDQIMANELPSLASVLYQSPDEFNLVEQNTGQFYMTGVSGNYNNSESSPVFGEKIVRQQMDSLLGLLDNNNDANNLSSKQKFNDSSQHVNTFDMDNCIISKPPALSLDEKMLKALSFFKESAGGGILAQVWVPIVHGGQVFLSTSEQPYLLDQMLAGYREVSRTFTFSTEGKPGFLPGLPGRVFISKVPEWTSNVGYYSPSEYLRVEHARNHDVRGSIAFPIFDLQSGLPCCAVLELVTTKEKLDFDRELEIICRSLQLVNLRTTMPFRLLPECLSNNKRAALTEIVDVLRSVCHAHRLPLALTWIPCFYTEGTRDETTRIQIKEGNSSSREKNILCIEESACYITDTAMEGFVHACIENPLEEGKGVAGKALQSNHPFFYSDVKTYDISEYPLVHHARKFNLNAAVAIRLRSTYTNNDDYILEFFLPINMKGSSEQQLLLDNLSGTMQKICKSLRTVSGAELSEIESSQAGFEKNSVPSFPPSSKRKSRIPFINENHGSVHKLSSKASNLRNNGNEPSSNQERNGPRRRGEKNRSSSEKNVSLSVLQQYFSGSLKDAAKSIGVCPTTLKRICRHHGISRWPSRKINKVNRSLKKIQTVLDSVEGVEGGLKFDPSVGAFVAKGTAIQEIDENRSLLFPEKSTTEDSEPFSQDAALVPPAHCSDSENSANKLNGKLKEINASLIDCSEDSKSFAMDDCPEQACFGSVLGKGDEWVLNKGGLREEEKCKHNTIGHRTNSFAVYEMDTGVDGDDEAVEHNNPASSSLTGSSNSSGSMVHDSSSGYQNRENQKQSKSKSIIVDSGSKIVVKATYGEDTIRFKFDPATGCLKLYEEVASRFKLQNGTFQLKYLDDEEEWVMLVNDSDLQECLEILNDMGTHNARFLVRDTPCTFGSSGSSGSYLGGSS

SEQ ID NO: 367 - protein, 547 aa, Trifolium subterraneum
MNMEDQFSSKDNGISFWTPLDNGMKSSITSDDMFNNISELMNFDNYAGQGISGKALQSNHPFFYTDVKAYDISEYPLVHHARKYNLNAAVATRLRSTYTNDDDYVLEFFLPINMIGSSEQQLLLDNLSDTMRRICKSLRTVSEGELRGIEGSRDGFLKENISGFFPMSKGNSQIAFSTGDPDLFQMPLMAGSHSQVTSESRKQAEKRRNAVEKNVSLSVLQQYFSGSLKDAAKKIGVCPTTLKRICRQHGISRWPSRKINKVNRSLKKIQTVLDSVQGVEGVLKFDPHTGGFVAGGSIIEQIGTHNKNLMFPEKISVENSAIKLEGDGVLISNSCEGDLKKDNNASSVDYIQDSTSWLWTKTRECPKQKSIDSVLEKEEDQCGLNNSSLHDIASNSSFSLIELGLDEGKGVDEPNHPTSSSMTDSSNASGSMVRGSSSGSQSIENHKNSKIKSICVDSESKFAVKATFRGDTIRFKFDPCLGCFQLYEEVATRFKLRNGSFQLKYLDDEEEWVLLVNDSDLKECVEVLSDSGTHCVKLLVRDIHGNS

SEQ ID NO: 368 - protein, 533 aa, Trifolium subterraneum
MVEEFVHACSEHHLEEGQGISVKALQSNHPFFYTDVKAYDISEYPLVHHARKYNLNAAVATRLRSTYTNDDDYVLEFFLPINMIGSSEQQLLLDNLSDTMRRICKSLRTVSEGELRGIEGSRDGFLKENISGFFPMSKGNSQIAFSTGDPDLFQMPLMAGSHSQVTSESRKQAEKGRNAVEKNVSLSVLQQYFSGSLKDAAKKIGGETPSIFVKICPTTLKRICRQHGISRWPSRKINKVNRSLKKIQTVLDSVQGVEGVLKFDPHTGGFVAGGSIMEQVGTHNKNLMFPEKSSVENSAIKLEDDGVLISNSCEGDLKKDNNVSSVDYIQDSTSWLWTKTRECPKQNSIDSVLEKEEDQCGLNNSSLHDIASNSSFSSIELGLDEGKGVDEPNHPTSSSMTDSSNAFGSMVRGSSSGSQSIENHKNSKIKSICVDSESKFAVKATFRGDTIRFKFDPCLGCFQLYEEVATRFKLRNGSFQLMYLDNEEEWVLLVNDSDLKECVQVLSDSGTHCVKLLVRHIHIVDSSQICLSI

SEQ ID NO: 369 - protein, 938 aa, Triticum aestivum
MDVPLPSQSNRAGCNGSVGSPSDDPYGVTAMMNFDGYSELCGSPSLADQLFSLLNDSSTHQMFAMWSSLGSSPRASGVSEDMQLDAYSSVPGDQKVDLVSSVNPAENGTGRMAKSSGDLGSDGDPEQGSTSVVPRPIAGNLLADRMLMALSLFRKSLGGGVLAQVWMPVEQEGHVVLSTCEQPFLLDQALAGYREVSRHFVFSAKEETCLQPGLPGRVFISGVPEWTSNVLYYSKPEYLRMEYALHHEVRGSLAMPIYDPSKGSCCAVLELITKKEKPDFDAEMNNLRHALQAVNLETAKDCIDQKVYSANQKATFTEILDVLRAICHAHMLPLALTWVPSSNGSDGGYVGHDNVLDSQSGKAILRIHESACYVNDAKMQGFFHACTETHLEKGQGIAGRALKSNLPFFSPNIREYGIKDYPLAHHARKFGLHAAVAIRLRSTYTGDDDYILEFFLPINCTGSEEQQMLLNNLSSTMQRICKSLRTVSEAEVDKVDACTAVMYKATSGSCLPTGQSGSSSHGDQPATEEAFQDLSLIDKQGDMSEQAQSSSMRLAEKKRSTAEKNIGMDVLRKYFSGSLKDAAKSLGVCPTTLKRICRTHGISRWPSRKINKVNRSLKKIQTVINSVHGVDSSLQYDPATGSLVPAVSLPEKTSFPSCDAVSSPSVGKTVDEKSGPKSEQGYSSPEGWERDSCQLQRPDAQKGEGDEFHMQTTNYSGSGDHGSYGPNVTHHIISEGTQGPLYPTGAVSALHDKETGCIEPLPCVLPSIKTTRDQIVGRNSPPMQQADIDMFDDREGREHTHPSTSGMTDSSSGSASSHPTFKKNPARPLKDKSSPALTVKATYNGDTVRFKFLPSMGWYHLLEEIAKRFKLSTGVFQLKYKDDEDEWVIMANDSDLQECVDVMDSMGTRNVKLQVRDLPCLISSSGSSSCLQLEGHNS

SEQ ID NO: 370 - skipped

SEQ ID NO: 371 - protein, 913 aa, Triticum urartu
MDVPLPSQSNRAGCNGSVGSPSDDPYGVTAMMNFDGYSELCGSPSLADQLFSLLNDSSTHQMFAMWSSLGSSPRASGVSEDMQLDAYSSVPGDQKVDLVSSVNPAETGTGRMAKSSGDLGSDGDPEQGSTSLVPRPIAGNLLADRMLMALSLFRKSLGGGILAQVWMPVEQEGHVVLSTCEQPFLLDQALAGYREVSRHFVFSAKEETGLQPGLPGRVFISGVPEWTSNVLYYSKPEYLRMEYALHHEVRGSLAMPIYDPSKGSCCAAVNLETAKDCIDQKVYSANQKAAFTEILDVLRAICHAHMLPLALTWVPSSNGSDGGYVGHDSVLDSQSGKAILRIHESACYVNDAKMQGFFHACTETHLEKGQGIAGRALKSNLPFFSPNIREYGIKDYPLAHHARKFGLHAAVAIRLRSTYTGDDDYILEFFLPINCTGSEEQQMLLNNLSSTMQRICKSLRTVSEAEVDKVDACTAVMYKATSGSCLPTGQSWSSSHGDQPATEEAFQDLSLIDKQGDMSEQAQSSSMRLAEKKRSTAEKNIGMDVLRKYFSGSLKDAAKSLGVCPTTLKRICRTHGISRWPSRKINKVNRSLKKIQTVINSVHGVDSSLQYDPATGSLVPAVSLPEKTSFPSCDAVSSPSVGKTVDEKSGPKSEQGYSSPEGWERDSCQLQRSDAQKGEGDEFHMQTTNYSGSGDHGSYGPNITHHISSEGTQGPLYPTGAVSALHDKETGCIEPLPCVLPSIKTTRDQIVGRNSPPMQQADIDMFDDREGREHTHPSTSGMTDSSSGSASSHPTFKKNPARPLKDKSSPALTVKATYNGDTVRFKFLPSMGWYHLLEEIAKRFKLLTGVFQLKYKDDEDEWVIMANDSDLQECVDVMDSMGTRNVKLQVRDLPCLISSSGSSSCLQLEGHNS

SEQ ID NO: 372 - protein, 1010 aa, Vigna angularis
MEYPFSSKEREIGDWQSSGTQLVGSTSLDSRMNNSISEDMPNSFSELMNFDTYAGLCNSPSISDQILANELPSFASLPYSLPDGFNLVQQNNGQCYMSGVGRNDNDMESSPIYGEKVVCQQVDTLLGFLNDSNEANNLNSKLKINGSSQHLNNSEAGNYIMSRPPALSLDERMLRALSFFKESAGGGILAQVWVPIKNGDQFILSTSEQPYLLDQMLAGYREVSRTFTFSAEGKSGCFLGLPGRVFTSKVHEWTSNVGYYSMNEYLRFEHAINHHVRGSIAFPIFDVHSELLCCAVLEIVTTKEKPDFNREIEIVCRALQLVNLSTAKPLRCLPQCLSNNKKATLTEIVDVLRSVCHAHRLPLALTWLPCCYTEGSRGEVTRIRTKGCHSTISGKNILCLEESACYITDRALAGFVRACTEHHIEEGKGIAGKALRSNHPFFCPDVKEYDISEYPLVHHARKYNLNAVVAIRLRSTYTNHDDYILEFFLPVNMRGGLEQQLLLDNLSGTMQRICSSLRTVSDAELSRIESSPEGFEKTNAPYFPPLSCQNSGVPLINGEYHSVPMMSSTPTKAGGNEIEPSANQGRYGAKRQVQKNKSTSEKNVSLSVLQQYFSGSLKDAAKNIGVCPTTLKRICRQHGISRWPSRKINKVNRSLKKIQTVLDSVRGVEGGLKFDSSMGAFVARGSIIQETDAHKSLLFPEKNIIKDPAHITQEAVPVPRAPSNNPPPKPWEQAGSSSGPAPFKPPSAGNTSDVVEASGTAKPGEIVSASDRTAAVNRNSLGRPVPTRPWEQNYGNNAYGGYGSTMNYNSGYGSGMYGSSYGGIGGGMYGSSYGGGLYGNSTYRGGYGGGMYGSSGMYGGGMYNSGFGGPMGGYGMGGGPYGDQDPNNPFGGPPSPPGFWISVLRVMQGVVNFFGRISILIDQNTQAFHLFMTALLQLFDRSGLLYGELARFVFRLLGIRSKSKKVHPPGPNGQLLPGPYNSSGDVNYIEAPKAAPSGSWDNVWGNDSPQ

SEQ ID NO: 373 - protein, 972 aa, Vigna angularis
MEYPFSSKEREIGDWQSSGTQLVGSTSLDSRMNNSISEDMPNSFSELMNFDTYAGLCNSPSISDQILANELPSFASLPYSLPDGFNLVQQNNGQCYMSGVGRNDNDMESSPIYGEKVVCQQVDTLLGFLNDSNEANNLNSKLKINGSSQHLNNSEAGNYIMSRPPALSLDERMLRALSFFKESAGGGILAQVWVPIKNGDQFILSTSEQPYLLDQMLAGYREVSRTFTFSAEGKSGCFLGLPGRVFTSKVHEWTSNVGYYSMNEYLRFEHAINHHVRGSIAFPIFDVHSELLCCAVLEIVTTKEKPDFNREIEIVCRALQLVNLSTAKPLRCLPQCLSNNKKATLTEIVDVLRSVCHAHRLPLALTWLPCCYTEGSRGEVTRIRTKGCHSTISGKNILCLEESACYITDRALAGFVRACTEHHIEEGKGIAGKALRSNHPFFCPDVKEYDISEYPLVHHARKYNLNAVVAIRLRSTYTNHDDYILEFFLPVNMRGGLEQQLLLDNLSGTMQRICSSLRTVSDAELSRIESSPEGFEKTNAPYFPPLSCQNSGVPLINGEYHSVPMMSSTPTKAGGNEIEPSANQGRYGAKRQVQKNKSTSEKNVSLSVLQQYFSGSLKDAAKNIGVCPTTLKRICRQHGISRWPSRKINKVNRSLKKIQTVLDSVRGVEGGLKFDSSMGAFVARGSIIQETDAHKSLLFPEKNIIKDPAHITQEAVPVPRAPCNEVEEELKKTNAFSVGCCEDSKSMAIDDGSCEMESLCTKVQDCPEQACLGSVLPEEQDKWTGNKSGLRVENCKCSILGQSSNSLIGKEMDIGVDGDAEVVEPNHPSSSSLTDSSNDSGSMMHSISSGSKSFKNQNQSKVKSTIVDSGSKLIVKAIYREDTIRFKFDPSAGCFRLYEEVAARFKLQTGSFQLKYLDDEEEWVMLVNDADLQECLDVLDDIGTCSVRFLVRDLPSILSSSGSSNSYLGGSS

SEQ ID NO: 374 - protein, 966 aa, Vigna angularis
MEDHFSPKGKETGYCTSPCTQLEESTSVDGGMKKSASEDMFSNFSELMNFDTYAGWSNSSSMNYQSLASVFSSFSSASYPPSDGLNLVEQGNGLCFMTEVSEIHNGIESSPSCEERGIFQQMDIQLGFLDEANDSNSFDSKQNRNGLYQQLNTSDMCNYMISRSSGRPLADRMLRSLSFFMESVDEGMLAQVWVPIKHGDEFILCTSEQPYLLDPKLAGYREVSRAFTFSAEGKKGSCPGLPARVFTSHVPEWTSNVGYYNKTEYLRLDHALNHEIRGSIALPVSDMHSHEPCAVLELVTTKEKPNFDRELEIVTQALQLVNLKTTMPPRLLPQCLSSNKRAALTEIVDVLRAVCHAHRLPLALTWIPCCYSEGIGDEAERIRIKEGHTSSDEKCVLCIEESACYINDAAIGGFVHACVEHHLEEGQGIAGKALQSNHPFFYTDVKTYDISEYPLVHHARKYNLNAAVAIRLRSTYTNDDDYILEFFLPVNMTGSSEQQLLLDNLSGTMRRICRSLRTVSDTEITGIEGSVAGFPKEKLSYFFPMSKRNSQIAFINDDYDSNQKMSLKASNNGIEAAHGQVMNGPRKQIEKKRSTVEKNVSLSVLQQYFSGSLKDAAKSIGVCPTTLKRICRQHGISRWPSRKINKVNRSLKKIQTVLDSVQGVEGGLKFDPYTGGFIAGGSLMQEIDTHKYILFPEKSAVKDPKHATQKPVSVVSAPGSTSENSTIKLDDDDDGVCLVENKIVDSRSALLSNTSEGGFKKDNASSDDCCEDSKSVAMNDGSSQKAKNQDCPEQTCSISLVTDEAEVGVDGGEGIEEHNNLINSSSTTNSSNGSGSMMHGSSSCSQSFENQKHSKVKPTCVDSESKMIVKASYRGDTIRFKFDPSAGCFQLYEEVATRFKLQNGLFKLKYLDDEEEWVMLENDSDLQECVEILHDIGTRCVKFLVRDVPCVLSSCGSNNYFLPDSS

SEQ ID NO: 375 - protein, 979 aa, Vigna radiata
  var. radiata
MEYPFSSKEREIGDWQSFGNQLVGSTSLDSRMSNSISEDMPNSFSELMNFDTYAGLCTSPSISDQILANELPSFASLPYSLPDGFNLVQQNNGQCYMSGVGRNDNDMESSPIYGEKVACQQVDTLLGFLNDANEANNLNSKLKIIGSSQHLNNSDAGNYIMSRPPALSLDERMLRALSFFKESAGGGILAQVWVPIKNGDQFILSTSEQPYLLDQMLAGYREVSRTFTFPAEGKSGCFLGLPGRVFTSKVHEWTSDVGYYSMNEYLRFEHAINHHVRGSIAFPIFEMHSELLCCAVLEIVTTKEKPDFNREFEIVCRALQLVNLSTAKPLRCLPQCLSNNKKATLTEIVDVLRSVCHAHRLPLALTWLPCCYTEGSRGEVTRIRTKGCHSTISGKNILCLEESACYITDRALAGFVRACTEHHIEEGKGIAGKALRSNHPFFCPDVKAYDISEYPLVHHARKYNLNAAVAIRLRSTYTNHDDYILEFFLPVNMRGGLEQQLLLDNLSGTMQRICSSLRTVSDAELSRIDSSQQGFEMKNAPYFPPLSCQNSGVPLINGDYHSVPMMPSTPTNAGGNEIEPSANQGRNGAKRQVQKNRSTSEKNVSLSVLQQYFSGSLKDAAKNIGVCPTTLKRICRQHGISRWPSRKINKVNRSLKKIQTVLDSVRGVEGGLKFDPSMGAFVARGSIIQETDAHKSLLFPEKNIIKDPAHITQEAVPVPRAPCNEVENFSFKLEEELKKTNSFSVGCCEDSKSMAIDDGSCEMESLCTKLQDCPEQACLGSVLPKEQEKWTRNKSGLRVENFKCSILGQSSNSLIGKEMDIGVDGDAEVVEPNHPSSSSLTDSSNDSGSMMHSISSGSESFKNHNQSKVKSTIVDSGSKLIVKAIYREDTIRFKFDRSAGCFRLYEEVAARFKLQTGSFQLKYLDDEEEWVMLVSDADLQECLDILDDIGTCSVRFLVRDLPSILTSSGSSNSYLGGSS

SEQ ID NO: 376 - protein, 967 aa, Vigna radiata
  var. radiata
MEDHFSPKGKETGYCTSPCTQLEESTSVDGGMKKSASEDMFSNFSELMNFDTYAGWSNSSSMTYHSLANVFSSFSSASYPPSDGLNLVEHGNGPCFMTEVSEIHNGIESSPSCEERGIFQQMDIQLGFLDEANDSNSFDSEQNRNGSYQQFNTSDMCNYMISRSSGRPLDDRMLRALSFFMESVDEGMLAQVWVPIKHGDEFILCTSEQPYLLDPKLAGYREVSRAFTFSAEGKKGSCPGLPARVFTSHVPEWTSNVGYYNKTEYLRLDHALNHDIRGSIALPVSDMHSHEPCAVLELVTTKEKPNFDRELEIVTHALQLVNLKTTMPPRLLPQCLSSNKRAALTEIVDVLRAVCHAHRLPLALTWIPCCYSEGIGDEAERIRIKEGHTSSNEKCVLCIEESACYINDGAIGGFVHACVEHHLEEGQGIAGKALQSNHPFFYTDVKTYDISEYPLVHHARKYNLNAAVAIRLRSTYTNDDDYILEFFLPVNMTGSSEQQLLLDNLSGTMRRICRSLRTVSDAEITGIEGSVAGLPKEKLTYFFPMSRRNSQIAFINDDNDSNQKMSLKASNNGIEAAHGQVMNGPRKQIEKKRSTVEKNVSLSVLQQYFSGSLKDAAKSIGVCPTTLKRICRQHGISRWPSRKINKVNRSLKKIQTVLDSVQGVEGGLKFDPYTGGFIAGGSLMQEIDTHKYILFPERSAVKDPKHATQKPVSVVSAPGSTSENSTIKLDDDDGVCLVENKIVDSRSALLSNTSVGGFKKDNASSDDCCEDSKSVAMNDGSSQKAKNQDCPEQTCSISLVTDEAEVGVDGGEGIEEHNNLVNSSSTTNSSNGSGSGSMMHGSSSCSQSFENQKHSKVKPTSVDSESKMIVKASYRGDTIRFKFDPSAGCFQLYEEVATRFKLQNGLFKLKYLDDEEEWVMLENDSDLQECVEILHDIGTRCVKFLVRDVPCVLSSCDSNNCFLSDSS

SEQ ID NO: 377 - protein, 1000 aa, Ziziphus jujuba
MEYPISSKEKGIENWASSRAQVESMASFDGGTRNSLAEDMFNNISEFMDFDNYAGWCDSSSAVDQMAASYGLPSYPSVSYAPMDAFNFTEQSIGSLPVAEAGGDFNLEKGPLNYGDKTVFQQVDNQYGLSSNSNVANESVTKQSDGSFQQNNVVDVANSIISRPPAVSLDEKMLKALSLFKESSGGGILAQVWVPMKHGDQYFLSTCERPYLLDHMLAGYREVSRLYKFSAEGKQGSFPGLPGRVFMSKIPEWTSNVGYYSKTEYLRADHAHNHQVRGSIALPVFDSEPEVSCCAVLELVTTKEKSNFDSEMEVVCRSLQAVNLRTSVPPRLLPQCLSENQKDALAEIVDVLRVVCHAHRLPLALTWIPCCYTEGAGKENMGLHVREGNKSSNGKSILCIEETACYVNDRAMLDFVRSCVENYLEEGQGLAGKALQSNVPFFFPDVKTYNIYEYPLVHHARKFGLNAAVAIRLRSTYTGDEDYILELFLPVNMTGALEQQLLLNNLSRTMQRICKSLRTVSETQLSGAGFSDIEFQKGSIQNFPIMSRGNSQNALSDSDVNSMEGMILNIPDQKNEGIEADIPCEQAVGGPRRQMEKKRNTAEKNVSLSVLQQYFSGSLKDAAKSIGVCPTTLKRICRQHGISRWPSRKINKVNRSLRKIQSVLDSVKGVEGGLKFDPTTGEFMATASVIQDFDTQKNLLFPEKIQSMRNPELITQHAVQATTVPFTEGEDFVIKLEEDEYCVGGNIPIQNSCETESKKLNTPILNSNGSSKPISIDTGSNQPCSFVTRLQNCPENAFLPSYIVKGVKQLSQNKYSMKLENSDWHFASRSSSSMAAADEMDAGGDDDDGILEHNQPTSSSMTDSSNGSGSMVNDCSSGSQGFDEHKHPKGKRNCVDGESKITVKATYKEDTIRFKFEPSAGCFQLYEEVARRFKLQNGTFQLKYLDDEEEWVMLVSESDLQECLEILDDIGTRTVKFQVRDKPCGLSSSGSSNCFLTGSS

SEQ ID NO: 378 - protein, 959 aa, Arabidopsis thaliana
MCEPDDNSARNGVTTQPSRSRELLMDVDDLDLDGSWPLDQIPYLSSSNRMISPIFVSSSSEQPCSPLWAFSDGGGNGFHHATSGGDDEKISSVSGVPSFRLAEYPLFLPYSSPSAAENTTEKHNSFQFPSPLMSLVPPENTDNYCVIKERMTQALRYFKESTEQHVLAQVWAPVRKNGRDLLTTLGQPFVLNPNGNGLNQYRMISLTYMFSVDSESDVELGLPGRVFRQKLPEWTPNVQYYSSKEFSRLDHALHYNVRGTLALPVFNPSGQSCIGVVELIMTSEKIHYAPEVDKVCKALEAVNLKSSEILDHQTTQICNESRQNALAEILEVLTVVCETHNLPLAQTWVPCQHGSVLANGGGLKKNCTSFDGSCMGQICMSTTDMACYVVDAHVWGFRDACLEHHLQKGQGVAGRAFLNGGSCFCRDITKFCKTQYPLVHYALMFKLTTCFAISLQSSYTGDDSYILEFFLPSSITDDQEQDLLLGSILVTMKEHFQSLRVASGVDFGEDDDKLSFEIIQALPDKKVHSKIESIRVPFSGFKSNATETMLIPQPVVQSSDPVNEKINVATVNGVVKEKKKTEKKRGKTEKTISLDVLQQYFTGSLKDAAKSLGVCPTTMKRICRQHGISRWPSRKIKKVNRSITKLKRVIESVQGTDGGLDLTSMAVSSIPWTHGQTSAQPLNSPNGSKPPELPNTNNSPNHWSSDHSPNEPNGSPELPPSNGHKRSRTVDESAGTPTSHGSCDGNQLDEPKVPNQDPLFTVGGSPGLLFPPYSRDHDVSAASFAMPNRLLGSIDHFRGMLIEDAGSSKDLRNLCPTAAFDDKFQDTNWMNNDNNSNNNLYAPPKEEAIANVACEPSGSEMRTVTIKASYKDDIIRFRISSGSGIMELKDEVAKRLKVDAGTFDIKYLDDDNEWVLIACDADLQECLEIPRSSRTKIVRLLVHDVTTNLGSSCESTGEL

SEQ ID NO: 379 - protein, 841 aa, Arabidopsis thaliana
MELDDLDLSGSWPLDQITFASNFKSPVIFSSSEQPFSPLWSFSETSGDVGGELYSAAVAPTRFTDYSVLLASSESETTTKENNQVPSPSWGIMPLENPDSYCAIKAKMTQALRYFKESTGQQHVLAQVWAPVKNRGRYVLTTSGQPFVLGPNSNGLNQYRMVSLTYMFSLDGERDGELGLPGRVFRKKLPEWTPNVQYYSSKEFSRLGHALHYNVQGTLALPVFEPSRQLCVGVVELIMTSPKINYAPEVEKVCKALEAVNLKTSEILNHETTQICNEGRQNALAEILEILTVVCETYKLPLAQTWVPCRHRSVLAFGGGFKKSCSSFDGSCMGKVCMSTSDLAVYVVDAHVWGFRDACAEHHLQKGQGVAGRAFQSGNLCFCRDVTRFCKTDYPLVHYARMFKLTSCFAVCLKSTYTGDDEYVLEFFLPPAITDKSEQDCLLGSLLQTMKQHYSSLKVVSETELCENNMSLEVVEASEDGMVYSKLEPIRIHHPAQISKDYLELNAPEQKVSLNSDFMENNEVDDGVERFQTLDPIPEAKTVKKSERKRGKTEKTISLEVLQQYFAGSLKDAAKSLGVCPTTMKRICRQHGISRWPSRKINKVNRSLTRLKHVIDSVQGADGSLNLTSLSPRPWPHQIPPIDIQLAKNCPPTSTSPLSNLQDVKIENRDAEDSAGSSTSRASCKVNPICETRFRLPTHNQEPSRQVALDDSDSSSKNMTNFWAHLTCQDTASPTILQHKLVSIKATYREDIIRFKISPESVSITELKQQVAKRLKLETAAFELKYLDDDREWVSVSCDADLSECLDTSAAKANTLRLSVHDVTFNFGSSCESSEETMMCL

SEQ ID NO: 380 - protein, 967 aa, Arachis duranensis
MSESEEDKTDFASLKSKEDQQQSPPQLPPPSAMDFDLDLETSWPLDHLSFVSNNPMSPFLFPISSEQPSSPLWLFSDAEDERHNNTLASAPAFSDFHKIFSCDSNSVTEKPVENANDEDKKLLPPIVAMPPLEILDRYCVIKERMTQALRYYKELTEQNVLAQVWAPVRNGNRFVLTTSGQPFVLDPHSNGLHQYRTVSLMYVFSADGEKEESLGLPGRVYQQKVPEWTPDVQYYSTKEYPRRDHAQHYNVRGTLALPVFEPSMQSCVGVLELIMTSQKINYAPEVDKICRALEAVNLKSSEILGHQYTQICNEGRQNALAEILEILTVVCETHNLPLAQTWVPCRHRSVLAHGGGLKKSCSSFDGSCMGKVCMSTTDIAFYIIDAHLWGFREACVEHHLQQGQGVAGRAFSSHSMSFCRNITRFCKIDYPLVHYALMFGLTSSFSICLRSSHTGDDDYVLEFFLPPRITDFNEQKALLGSILTIMKQHFQSLKIASGVELEQNALVETIEATIEGVHLRFESIPVRQDASPNVREELAQDPSLQKIMMGCNDGGSIGDQIPSLETKNTNKPSERKRGKTEKSISLEVLQRYFAGSLKDAAKSLGVCPTTMKRICRQHGISRWPSRKINKVNRSLSKLKRVIESVQGAEGAFALNPLSTSPLPFPEHSTPNKFSQQASPTEPQIRENELDASKVLETTRIARAQCLEKMVNDKSGSIREVGKETKGPRAKSCSSADSTNPTSHGSCHGSPPIESSPVKDIFITSNNDQCVGLRSPEATMQPPNNTLSYPTTCTMPDMVATELQEPFGGMLVEDAGSSKDLRNLCPSVAEAIVEDMAPEPCRTNPPFSGLAPKQCMDPLKETVTPFAARIEMKTVTIKATYREDIIRFRVSLNCGIVELKEEVAKRLKLEVGTFDIKYLDDDHEWVLIACDADLQECIDVSRSSASNIIRVLVHEITSNLGSSCESSG

SEQ ID NO: 381 - protein, 986 aa, Arachis duranensis
MPDSCEEKSELPSKSKPQEEHGFPMDFDIYLESSSWPMDHTPSASNPMSPFIITTSSEQPFSPLWAFSDVEDDHRHVRVVAGDNTNTNTAIETENPVENDDNKKIVSPPFVPLPPIKIPDGYCLIKERMTQALRHFKQLTEQNFLAQVWAPVRNGNRYALTTSGQPFVLDPHSNGLHQYRTVSLMYMFPVDGENDEILGLPGRVFQQKLPEWTPNVQYYTSREYSRRNHAQHYNVRGTLALPVFESPGQSCVGVLELIMTSEKVNYAPEVDKVCKALEAVNLRSSEILEHPFAQICNEGRQNALAEILEILTVVCETHNLPLAQTWVPCRHRSVLANGGGLKKSCSSFDGHCMGRVCMSASDVAFYVIDAHTWGFHDACAEHHLQQGQGVAGRAFLSHNMSFCGNITQFCKTDYPLVHYALMFGLTSCFAICLQSSHTGSDDYVLEFFLPPSITNFYEQKDLLGSILATMKQNFQSLKVAAGVELEEGCTIEVVEPINERIHLSLESVPVAQSAKSPPPTLNASLNKDDGVPQGPLEQQMPAWLEDINDGGNLGDNAGGSMNPMTSLDAKIKKKPSERKRGKAEKMISLEVLQRYFSGSLKDAAKSLGVCPTTMKRICRQHGISRWPSRKINKVNRSLSKLKCVIESVRGAEGAFALNSVNKDPLPIAAGSFTEPCTSKMFNRNASLSIQPSKTRMNENDLDTSRVSETNRQVRMQDQLLEGEQSPEKVIHEEGWSTQEVGTKDPEKFRNLSGSSEDSANPHSHNSCHGSPPNEISPANIFRPFNKEKSVPLGVSTESTMQPTNALNYANAYTALNVERTEPQEPFGRMLLEGVGSSKDLRNLCPLEDQALEACGVNPPCHDLAPKQCMMDTTLNSNNTMIPFAPKKEMKSVTIKATYKEDIIRFRVFLNCGIVELQEEISKRLKLEIGAFDIKYLDDDNEWVLISCDADLQECMDVLTSSGSNMIRLVVHDTVSILGSSCESSGN

SEQ ID NO: 382 - protein, 899 aa, Arachis duranensis
MQKMKGTTTLLLQLQLSLISTRYSLTSYDVEVKGDSNSVTEKPVENANDEDKKLLPPIVAMPPLEILDRYCVIKERMTQALRYYKELTEQNVLAQVWAPVRNGNRFVLTTSGQPFVLDPHSNGLHQYRTVSLMYVFSADGEKEESLGLPGRVYQQKVPEWTPDVQYYSTKEYPRRDHAQHYNVRGTLALPVFEPSMQSCVGVLELIMTSQKINYAPEVDKICRALEAVNLKSSEILGHQYTQICNEGRQNALAEILEILTVVCETHNLPLAQTWVPCRHRSVLAHGGGLKKSCSSFDGSCMGKVCMSTTDIAFYIIDAHLWGFREACVEHHLQQGQGVAGRAFSSHSMSFCRNITRFCKIDYPLVHYALMFGLTSSFSICLRSSHTGDDDYVLEFFLPPRITDFNEQKALLGSILTIMKQHFQSLKIASGVELEQNALVETIEATIEGVHLRFESIPVRQDASPNVREELAQDPSLQKIMMGCNDGGSIGDQIPSLETKNTNKPSERKRGKTEKSISLEVLQRYFAGSLKDAAKSLGVCPTTMKRICRQHGISRWPSRKINKVNRSLSKLKRVIESVQGAEGAFALNPLSTSPLPFPEHSTPNKFSQQASPTEPQIRENELDASKVLETTRIARAQCLEKMVNDKSGSIREVGKETKGPRAKSCSSADSTNPTSHGSCHGSPPIESSPVKDIFITSNNDQCVGLRSPEATMQPPNNTLSYPTTCTMPDMVATELQEPFGGMLVEDAGSSKDLRNLCPSVAEAIVEDMAPEPCRTNPPFSGLAPKQCMDPLKETVTPFAARIEMKTVTIKATYREDIIRFRVSLNCGIVELKEEVAKRLKLEVGTFDIKYLDDDHEWVLIACDADLQECIDVSRSSASNIIRVLVHEITSNLGSSCESSG

SEQ ID NO: 383 - protein, 839 aa, Arachis duranensis
MPPLEILDRYCVIKERMTQALRYYKELTEQNVLAQVWAPVRNGNRFVLTTSGQPFVLDPHSNGLHQYRTVSLMYVFSADGEKEESLGLPGRVYQQKVPEWTPDVQYYSTKEYPRRDHAQHYNVRGTLALPVFEPSMQSCVGVLELIMTSQKINYAPEVDKICRALEAVNLKSSEILGHQYTQICNEGRQNALAEILEILTVVCETHNLPLAQTWVPCRHRSVLAHGGGLKKSCSSFDGSCMGKVCMSTTDIAFYIIDAHLWGFREACVEHHLQQGQGVAGRAFSSHSMSFCRNITRFCKIDYPLVHYALMFGLTSSFSICLRSSHTGDDDYVLEFFLPPRITDFNEQKALLGSILTIMKQHFQSLKIASGVELEQNALVETIEATIEGVHLRFESIPVRQDASPNVREELAQDPSLQKIMMGCNDGGSIGDQIPSLETKNTNKPSERKRGKTEKSISLEVLQRYFAGSLKDAAKSLGVCPTTMKRICRQHGISRWPSRKINKVNRSLSKLKRVIESVQGAEGAFALNPLSTSPLPFPEHSTPNKFSQQASPTEPQIRENELDASKVLETTRIARAQCLEKMVNDKSGSIREVGKETKGPRAKSCSSADSTNPTSHGSCHGSPPIESSPVKDIFITSNNDQCVGLRSPEATMQPPNNTLSYPTTCTMPDMVATELQEPFGGMLVEDAGSSKDLRNLCPSVAEAIVEDMAPEPCRTNPPFSGLAPKQCMDPLKETVTPFAARIEMKTVTIKATYREDIIRFRVSLNCGIVELKEEVAKRLKLEVGTFDIKYLDDDHEWVLIACDADLQECIDVSRSSASNIIRVLVHEITSNLGSSCESSG

SEQ ID NO: 384 - protein, 937 aa, Arachis duranensis
MLKMITGMSGLLQVQLSLRPWIHLLFHVIFWFCDNTNTNTAIETENPVENDDNKKIVSPPFVPLPPIKIPDGYCLIKERMTQALRHFKQLTEQNFLAQVWAPVRNGNRYALTTSGQPFVLDPHSNGLHQYRTVSLMYMFPVDGENDEILGLPGRVFQQKLPEWTPNVQYYTSREYSRRNHAQHYNVRGTLALPVFESPGQSCVGVLELIMTSEKVNYAPEVDKVCKALEAVNLRSSEILEHPFAQICNEGRQNALAEILEILTVVCETHNLPLAQTWVPCRHRSVLANGGGLKKSCSSFDGHCMGRVCMSASDVAFYVIDAHTWGFHDACAEHHLQQGQGVAGRAFLSHNMSFCGNITQFCKTDYPLVHYALMFGLTSCFAICLQSSHTGSDDYVLEFFLPPSITNFYEQKDLLGSILATMKQNFQSLKVAAGVELEEGCTIEVVEPINERIHLSLESVPVAQSAKSPPPTLNASLNKDDGVPQGPLEQQMPAWLEDINDGGNLGDNAGGSMNPMTSLDAKIKKKPSERKRGKAEKMISLEVLQRYFSGSLKDAAKSLGVCPTTMKRICRQHGISRWPSRKINKVNRSLSKLKCVIESVRGAEGAFALNSVNKDPLPIAAGSFTEPCTSKMFNRNASLSIQPSKTRMNENDLDTSRVSETNRQVRMQDQLLEGEQSPEKVIHEEGWSTQEVGTKDPEKFRNLSGSSEDSANPHSHNSCHGSPPNEISPANIFRPFNKEKSVPLGVSTESTMQPTNALNYANAYTALNVERTEPQEPFGRMLLEGVGSSKDLRNLCPLEDQALEACGVNPPCHDLAPKQCMMDTTLNSNNTMIPFAPKKEMKSVTIKATYKEDIIRFRVFLNCGIVELQEEISKRLKLEIGAFDIKYLDDDNEWVLISCDADLQECMDVLTSSGSNMIRLVVHDTVSILGSSCESSGN

SEQ ID NO: 385 - protein, 852 aa, Arachis duranensis
MLKMITGMSGLLQVWAPVRNGNRYALTTSGQPFVLDPHSNGLHQYRTVSLMYMFPVDGENDEILGLPGRVFQQKLPEWTPNVQYYTSREYSRRNHAQHYNVRGTLALPVFESPGQSCVGVLELIMTSEKVNYAPEVDKVCKALEAVNLRSSEILEHPFAQICNEGRQNALAEILEILTVVCETHNLPLAQTWVPCRHRSVLANGGGLKKSCSSFDGHCMGRVCMSASDVAFYVIDAHTWGFHDACAEHHLQQGQGVAGRAFLSHNMSFCGNITQFCKTDYPLVHYALMFGLTSCFAICLQSSHTGSDDYVLEFFLPPSITNFYEQKDLLGSILATMKQNFQSLKVAAGVELEEGCTIEVVEPINERIHLSLESVPVAQSAKSPPPTLNASLNKDDGVPQGPLEQQMPAWLEDINDGGNLGDNAGGSMNPMTSLDAKIKKKPSERKRGKAEKMISLEVLQRYFSGSLKDAAKSLGVCPTTMKRICRQHGISRWPSRKINKVNRSLSKLKCVIESVRGAEGAFALNSVNKDPLPIAAGSFTEPCTSKMFNRNASLSIQPSKTRMNENDLDTSRVSETNRQVRMQDQLLEGEQSPEKVIHEEGWSTQEVGTKDPEKFRNLSGSSEDSANPHSHNSCHGSPPNEISPANIFRPFNKEKSVPLGVSTESTMQPTNALNYANAYTALNVERTEPQEPFGRMLLEGVGSSKDLRNLCPLEDQALEACGVNPPCHDLAPKQCMMDTTLNSNNTMIPFAPKKEMKSVTIKATYKEDIIRFRVFLNCGIVELQEEISKRLKLEIGAFDIKYLDDDNEWVLISCDADLQECMDVLTSSGSNMIRLVVHDTVSILGSSCESSGN

SEQ ID NO: 386 - protein, 845 aa, Arachis duranensis
MLFFGFVWAPVRNGNRYALTTSGQPFVLDPHSNGLHQYRTVSLMYMFPVDGENDEILGLPGRVFQQKLPEWTPNVQYYTSREYSRRNHAQHYNVRGTLALPVFESPGQSCVGVLELIMTSEKVNYAPEVDKVCKALEAVNLRSSEILEHPFAQICNEGRQNALAEILEILTVVCETHNLPLAQTWVPCRHRSVLANGGGLKKSCSSFDGHCMGRVCMSASDVAFYVIDAHTWGFHDACAEHHLQQGQGVAGRAFLSHNMSFCGNITQFCKTDYPLVHYALMFGLTSCFAICLQSSHTGSDDYVLEFFLPPSITNFYEQKDLLGSILATMKQNFQSLKVAAGVELEEGCTIEVVEPINERIHLSLESVPVAQSAKSPPPTLNASLNKDDGVPQGPLEQQMPAWLEDINDGGNLGDNAGGSMNPMTSLDAKIKKKPSERKRGKAEKMISLEVLQRYFSGSLKDAAKSLGVCPTTMKRICRQHGISRWPSRKINKVNRSLSKLKCVIESVRGAEGAFALNSVNKDPLPIAAGSFTEPCTSKMFNRNASLSIQPSKTRMNENDLDTSRVSETNRQVRMQDQLLEGEQSPEKVIHEEGWSTQEVGTKDPEKFRNLSGSSEDSANPHSHNSCHGSPPNEISPANIFRPFNKEKSVPLGVSTESTMQPTNALNYANAYTALNVERTEPQEPFGRMLLEGVGSSKDLRNLCPLEDQALEACGVNPPCHDLAPKQCMMDTTLNSNNTMIPFAPKKEMKSVTIKATYKEDIIRFRVFLNCGIVELQEEISKRLKLEIGAFDIKYLDDDNEWVLISCDADLQECMDVLTSSGSNMIRLVVHDTVSILGSSCESSGN

SEQ ID NO: 387 - protein, 967 aa, Arachis hypogaea
MSESEEDKTDFASLKSKEDQQQSPPQLPPPSAMDFDLDLETSWPLDHLSFVSNNPMSPFLFPISSEQPSSPLWLFSDAEDERHNNTLASAPAFSDFHKIFSCDSNSVTEKPVENANDEDKKLLPPIVAMPPLEILDRYCVIKERMTQALRYYKELTEQNVLAQVWAPVRNGNRFVLTTSGQPFVLDPHSNGLHQYRTVSLMYVFSADGEKEESLGLPGRVYQQKVPEWTPDVQYYSTKEYPRRDHAQHYNVRGTLALPVFEPSMQSCVGVLELIMTSQKINYAPEVDKICRALEAVNLKSSEILGHQYAQICNEGRQNALAEILEILTVVCETHNLPLAQTWVPCRHRSVLAHGGGLKKSCSSFDGSCMGKVCMSTTDIAFYIIDAHLWGFREACVEHHLQQGQGVAGRAFSSHSMSFCRNITRFCKIDYPLVHYALMFGLTSSFSICLRSSHTGDDDYVLEFFLPPRITDFNEQKALLGSILTIMKQHFQSLKIASGVELEQNALVETIEATIEGVHLRFESIPVRQDASPNVREELAQDPSLQKIMMGCNDGGSIGDQIPSLETKNTNKPSERKRGKTEKSISLEVLQRYFAGSLKDAAKSLGVCPTTMKRICRQHGISRWPSRKINKVNRSLSKLKRVIESVQGAEGAFALNPLSTSPLPFPEHSTPNKFSQQASPTEPQIRENELDASKVLETTRIARAQCLEKMVNDKSGSIREVGKETKGPRAKSCSSADSTNPTSHGSCHGSPPIESSPVKDIFITSNNDQCVGLRSPEATMQPPNNTLSYPTTCTMPDMVATELQEPFGGMLVEDAGSSKDLRNLCPSVAEAIVEDMAPEPCRTNPPFSGLAPKQCMDPLKETVTPFAARIEMKTVTIKATYREDIIRFRVSLNCGIVELKEEVAKRLKLEVGTFDIKYLDDDHEWVLIACDADLQECIDVSRSSASNIIRVLVHEITSNLGSSCESSG

SEQ ID NO: 388 - protein, 986 aa, Arachis hypogaea
MPDSCEEKSELPSKSKPQEEHGFPMDFDIYLESSSWPMDHTPSASNPMSPFIITTSSEQPFSPLWAFSDVEDDHRHVRVVAGDNTNTNTAIETENPVENDDNKKIVSPHFVPLPPIKIPDGYCLIKERMTQALRHFKQLTEQNFLAQVWAPVRNGNRYALTTSGQPFVLDPHSNGLHQYRTVSLMYMFPVDGENDEILGLPGRVFQQKLPEWTPNVQYYTSREYSRRNHAQHYNVRGTLALPVFESPGQSCVGVLELIMTSEKVNYAPEVDKVCKALEAVNLRSSEILEHPFAQICNEGRQNALAEILEILTVVCETHNLPLAQTWVPCRHRSVLANGGGLKKSCSSFDGHCMGRVCMSASDVAFYVIDAHTWGFHDACAEHHLQQGQGVAGRAFLSHNMSFCGNITQFCKTDYPLVHYALMFGLTSCFAICLQSSHTGSDDYVLEFFLPPSVTNFYEQKDLLGSILATMKQNFQSLKVAAGVELEEGCTIEVVEPINERIHLSLESVPVAQSAKSPPPTLNASLNKDDGVPQGPLEQQMPAWLEDINDGGNLGDNAGGSMNPMTSLDAKIKKKPSERKRGKAEKMISLEVLQRYFSGSLKDAAKSLGVCPTTMKRICRQHGISRWPSRKINKVNRSLSKLKCVIESVRGAEGAFALNSVNKDPLPIAAGSFTEPCTSKMFNRNASLSIQPSKTQMNENDLDTSRVSETNRQVRMQDQLLEGEQSPEKVIHEEGWSTQEVGTKDPEKFRNLSGSSEDSANPHSHDSCHGSPPNEISPANIFRPFNKEKSVPLRVSAESTMQPTNALNYANAYTALNVERTEPQEPFGRMLLEGVGSSKDLRNLCPLEDQALEACGVNPPCHDLAPKQCMMDTTLNSNNTMIPFAPKKETKSVTIKATYKEDIIRFRVSLNCGIVELQEEISKRLKLEIGAFDIKYLDDDNEWVLISCDADLQECMDVLTSSGSNMIRLVVHDTVSILGSSCESSGN

SEQ ID NO: 389 - protein, 930 aa, Arachis hypogaea
MSGLLQVQLSLRPWIHLLFHVIFWFCDNTNTNTAIETENPVENDDNKKIVSPHFVPLPPIKIPDGYCLIKERMTQALRHFKQLTEQNFLAQVWAPVRNGNRYALTTSGQPFVLDPHSNGLHQYRTVSLMYMFPVDGENDEILGLPGRVFQQKLPEWTPNVQYYTSREYSRRNHAQHYNVRGTLALPVFESPGQSCVGVLELIMTSEKVNYAPEVDKVCKALEAVNLRSSEILEHPFAQICNEGRQNALAEILEILTVVCETHNLPLAQTWVPCRHRSVLANGGGLKKSCSSFDGHCMGRVCMSASDVAFYVIDAHTWGFHDACAEHHLQQGQGVAGRAFLSHNMSFCGNITQFCKTDYPLVHYALMFGLTSCFAICLQSSHTGSDDYVLEFFLPPSVTNFYEQKDLLGSILATMKQNFQSLKVAAGVELEEGCTIEVVEPINERIHLSLESVPVAQSAKSPPPTLNASLNKDDGVPQGPLEQQMPAWLEDINDGGNLGDNAGGSMNPMTSLDAKIKKKPSERKRGKAEKMISLEVLQRYFSGSLKDAAKSLGVCPTTMKRICRQHGISRWPSRKINKVNRSLSKLKCVIESVRGAEGAFALNSVNKDPLPIAAGSFTEPCTSKMFNRNASLSIQPSKTQMNENDLDTSRVSETNRQVRMQDQLLEGEQSPEKVIHEEGWSTQEVGTKDPEKFRNLSGSSEDSANPHSHDSCHGSPPNEISPANIFRPFNKEKSVPLRVSAESTMQPTNALNYANAYTALNVERTEPQEPFGRMLLEGVGSSKDLRNLCPLEDQALEACGVNPPCHDLAPKQCMMDTTLNSNNTMIPFAPKKETKSVTIKATYKEDIIRFRVSLNCGIVELQEEISKRLKLEIGAFDIKYLDDDNEWVLISCDADLQECMDVLTSSGSNMIRLVVHDTVSILGSSCESSGN

SEQ ID NO: 390 - protein, 852 aa, Arachis hypogaea
MLKMITGMSGLLQVWAPVRNGNRYALTTSGQPFVLDPHSNGLHQYRTVSLMYMFPVDGENDEILGLPGRVFQQKLPEWTPNVQYYTSREYSRRNHAQHYNVRGTLALPVFESPGQSCVGVLELIMTSEKVNYAPEVDKVCKALEAVNLRSSEILEHPFAQICNEGRQNALAEILEILTVVCETHNLPLAQTWVPCRHRSVLANGGGLKKSCSSFDGHCMGRVCMSASDVAFYVIDAHTWGFHDACAEHHLQQGQGVAGRAFLSHNMSFCGNITQFCKTDYPLVHYALMFGLTSCFAICLQSSHTGSDDYVLEFFLPPSVTNFYEQKDLLGSILATMKQNFQSLKVAAGVELEEGCTIEVVEPINERIHLSLESVPVAQSAKSPPPTLNASLNKDDGVPQGPLEQQMPAWLEDINDGGNLGDNAGGSMNPMTSLDAKIKKKPSERKRGKAEKMISLEVLQRYFSGSLKDAAKSLGVCPTTMKRICRQHGISRWPSRKINKVNRSLSKLKCVIESVRGAEGAFALNSVNKDPLPIAAGSFTEPCTSKMFNRNASLSIQPSKTQMNENDLDTSRVSETNRQVRMQDQLLEGEQSPEKVIHEEGWSTQEVGTKDPEKFRNLSGSSEDSANPHSHDSCHGSPPNEISPANIFRPFNKEKSVPLRVSAESTMQPTNALNYANAYTALNVERTEPQEPFGRMLLEGVGSSKDLRNLCPLEDQALEACGVNPPCHDLAPKQCMMDTTLNSNNTMIPFAPKKETKSVTIKATYKEDIIRFRVSLNCGIVELQEEISKRLKLEIGAFDIKYLDDDNEWVLISCDADLQECMDVLTSSGSNMIRLVVHDTVSILGSSCESSGN

SEQ ID NO: 391 - protein, 845 aa, Arachis hypogaea
MLFFGFVWAPVRNGNRYALTTSGQPFVLDPHSNGLHQYRTVSLMYMFPVDGENDEILGLPGRVFQQKLPEWTPNVQYYTSREYSRRNHAQHYNVRGTLALPVFESPGQSCVGVLELIMTSEKVNYAPEVDKVCKALEAVNLRSSEILEHPFAQICNEGRQNALAEILEILTVVCETHNLPLAQTWVPCRHRSVLANGGGLKKSCSSFDGHCMGRVCMSASDVAFYVIDAHTWGFHDACAEHHLQQGQGVAGRAFLSHNMSFCGNITQFCKTDYPLVHYALMFGLTSCFAICLQSSHTGSDDYVLEFFLPPSVTNFYEQKDLLGSILATMKQNFQSLKVAAGVELEEGCTIEVVEPINERIHLSLESVPVAQSAKSPPPTLNASLNKDDGVPQGPLEQQMPAWLEDINDGGNLGDNAGGSMNPMTSLDAKIKKKPSERKRGKAEKMISLEVLQRYFSGSLKDAAKSLGVCPTTMKRICRQHGISRWPSRKINKVNRSLSKLKCVIESVRGAEGAFALNSVNKDPLPIAAGSFTEPCTSKMFNRNASLSIQPSKTQMNENDLDTSRVSETNRQVRMQDQLLEGEQSPEKVIHEEGWSTQEVGTKDPEKFRNLSGSSEDSANPHSHDSCHGSPPNEISPANIFRPFNKEKSVPLRVSAESTMQPTNALNYANAYTALNVERTEPQEPFGRMLLEGVGSSKDLRNLCPLEDQALEACGVNPPCHDLAPKQCMMDTTLNSNNTMIPFAPKKETKSVTIKATYKEDIIRFRVSLNCGIVELQEEISKRLKLEIGAFDIKYLDDDNEWVLISCDADLQECMDVLTSSGSNMIRLVVHDTVSILGSSCESSGN

SEQ ID NO: 392 - protein, 969 aa, Arachis ipaensis
MSESEEDKTDFASPKSKEEQQQQSPPQLPPPSAMDFDLDLETSWPLDHLSFVSNNPMSPFLFPISSEQPSSPLWLFSDAEDERHNNTLASAPAFSDFHKIFSCDSNSVTEKPVENANDEDKKLLPPIVAMPPLEILDRYCVIKERMTQALRYFKELTEQNVLAQVWAPVRNGNRFVLTTSGQPFVLDPHSNGLHQYRTVSLMYVFSADGEKEESLGLPGRVYQQKVPEWTPDVQYYSTKEYPRRDHAQHYNVRGTLALPVFEPSMQSCVGVLELIMTSQKINYAPEVDKICRALEAVNLKSSEILGHQYTQICNEGRQNALAEILEILTVVCETHNLPLAQTWVPCRHRSVLAHGGGLKKSCSSFDGSCMGKVCMSTTDIAFYIIDAHLWGFREACVEHHLQQGQGVAGRAFSSHSMSFCRNITRFCKIDYPLVHYALMFGLTSSFSICLRSSHTGDDDYVLEFFLPPRITDFNEQKALLGSILTIMKQHFQSLKIASGVELEQNALVETIEATIEGVHLRFESIPVRQDASPNVREELAQDPSLQKIMMGCNDGGSIGDQIPSLETKNTNKPSERKRGKTEKSISLEVLQRYFAGSLKDAAKSLGVCPTTMKRICRQHGISRWPSRKINKVNRSLSKLKRVIESVQGAEGAFTLNPLSTSPLPFPEHSTPNKFSQQASPTEPQIRENELDASKVLETTRIARAQCLEKMVNDKSGSIREVGKETKGPRAKSCSSADSTNPTSHGSCHGSPPIESSPVKDIFITSNNDQCVGLRSPEATMQPPNNTLSYPTTCAMPDMVATELQEPFGGMLVEDAGSSKDLRNLCPSVAEAIVEDMAPEPCRTNPPFSGLAPKQCMDPLKETVTPFASRKEMKTVTIKATYREDIIRFRVSLNCGIVELKEEVAKRLKLEVGTFDIKYLDDDHEWVLIACDADLQECIDVSRSSASNIIRVLVHEITSHLGSSCESSGE

SEQ ID NO: 393 - protein, 984 aa, Arachis ipaensis
MPDSCEEKSELPSKSKPQEEHGFPMDFDIYLESSSWPMDHTPSASNPMSPFIITTSSEQPFSPLWAFSDVEDDHRHVRVVAGDNTNTAIETENPVENDDNKKIVSPPFVPLPPIKIPDGYCLIKERMTQALRHFKQLTEQNFLAQVWAPVRNGNRYALTTSGQPFVLDPHSNGLHQYRTVSLMYMFPVDGENDEILGLPGRVFQQKLPEWTPNVQYYTSREYSRRNHAQHYNVRGTLALPVFESPGQSCVGVLELIMTSEKVNYAPEVDKVCKALEAVNLRSSEILEHPFAQICNEGRQNALAEILEILTVVCETHNLPLAQTWVPCRHRSVLANGGGLKKSCSSFDGHCMGRVCMSASDVAFYVIDAHTWGFHDACAEHHLQQGQGVAGRAFLSHNMSFCGNITQFCKTDYPLVHYALMFGLTSCFAICLQSSHTGSDDYVLEFFLPPSITNFYEQKDLLGSILATMKQNFQSLKVAAGVELEEGCTIEVVEPINERIHLSLESVPVAQSAKSPQPTLNASLNKDDGVPQGPLEQQMPAWLDDINDGGNLGDNAGGSTNLMTSLEAKIKKKPSERKRGKAEKMISLEVLQRYFSGSLKDAAKSLGVCPTTMKRICRQHGISRWPSRKINKVNRSLSKLKCVIESVQGAEGAFALNSVNKDPLPIAAGSFTEPCTSKMFNRNASLSIQPSKTQINENDLDTSRVSETNRQVRMQDQFLEGEQSPEKVIHEEGWSTQEVGTKDPEKFRNLSGSSEDSANPHSHDSCHGSPPNEISPANIFRPFNKEKSVPLRVSAESTMQPTNALNYANAYTALNVERTEPQEPFGRMLLEGVGSSKDLRNLCPLEDQALEACGVNPPCHDLAPKQCMMDITLNSNNTMIPFATKKEMKSVTIKATYKEDIIRFRVSLNCGIVELQEEISKRLKLEIGAFDIKYLDDDNEWVLISCDADLQECMDVLTSSGSNMIRLVVHDTVSILGSSCESSGN

SEQ ID NO: 394 - protein, 845 aa, Arachis ipaensis
MLFFGFVWAPVRNGNRYALTTSGQPFVLDPHSNGLHQYRTVSLMYMFPVDGENDEILGLPGRVFQQKLPEWTPNVQYYTSREYSRRNHAQHYNVRGTLALPVFESPGQSCVGVLELIMTSEKVNYAPEVDKVCKALEAVNLRSSEILEHPFAQICNEGRQNALAEILEILTVVCETHNLPLAQTWVPCRHRSVLANGGGLKKSCSSFDGHCMGRVCMSASDVAFYVIDAHTWGFHDACAEHHLQQGQGVAGRAFLSHNMSFCGNITQFCKTDYPLVHYALMFGLTSCFAICLQSSHTGSDDYVLEFFLPPSITNFYEQKDLLGSILATMKQNFQSLKVAAGVELEEGCTIEVVEPINERIHLSLESVPVAQSAKSPQPTLNASLNKDDGVPQGPLEQQMPAWLDDINDGGNLGDNAGGSTNLMTSLEAKIKKKPSERKRGKAEKMISLEVLQRYFSGSLKDAAKSLGVCPTTMKRICRQHGISRWPSRKINKVNRSLSKLKCVIESVQGAEGAFALNSVNKDPLPIAAGSFTEPCTSKMFNRNASLSIQPSKTQINENDLDTSRVSETNRQVRMQDQFLEGEQSPEKVIHEEGWSTQEVGTKDPEKFRNLSGSSEDSANPHSHDSCHGSPPNEISPANIFRPFNKEKSVPLRVSAESTMQPTNALNYANAYTALNVERTEPQEPFGRMLLEGVGSSKDLRNLCPLEDQALEACGVNPPCHDLAPKQCMMDITLNSNNTMIPFATKKEMKSVTIKATYKEDIIRFRVSLNCGIVELQEEISKRLKLEIGAFDIKYLDDDNEWVLISCDADLQECMDVLTSSGSNMIRLVVHDTVSILGSSCESSGN

SEQ ID NO: 395 - protein, 852 aa, Arachis ipaensis
MLKMITGMSGLLQVWAPVRNGNRYALTTSGQPFVLDPHSNGLHQYRTVSLMYMFPVDGENDEILGLPGRVFQQKLPEWTPNVQYYTSREYSRRNHAQHYNVRGTLALPVFESPGQSCVGVLELIMTSEKVNYAPEVDKVCKALEAVNLRSSEILEHPFAQICNEGRQNALAEILEILTVVCETHNLPLAQTWVPCRHRSVLANGGGLKKSCSSFDGHCMGRVCMSASDVAFYVIDAHTWGFHDACAEHHLQQGQGVAGRAFLSHNMSFCGNITQFCKTDYPLVHYALMFGLTSCFAICLQSSHTGSDDYVLEFFLPPSITNFYEQKDLLGSILATMKQNFQSLKVAAGVELEEGCTIEVVEPINERIHLSLESVPVAQSAKSPQPTLNASLNKDDGVPQGPLEQQMPAWLDDINDGGNLGDNAGGSTNLMTSLEAKIKKKPSERKRGKAEKMISLEVLQRYFSGSLKDAAKSLGVCPTTMKRICRQHGISRWPSRKINKVNRSLSKLKCVIESVQGAEGAFALNSVNKDPLPIAAGSFTEPCTSKMFNRNASLSIQPSKTQINENDLDTSRVSETNRQVRMQDQFLEGEQSPEKVIHEEGWSTQEVGTKDPEKFRNLSGSSEDSANPHSHDSCHGSPPNEISPANIFRPFNKEKSVPLRVSAESTMQPTNALNYANAYTALNVERTEPQEPFGRMLLEGVGSSKDLRNLCPLEDQALEACGVNPPCHDLAPKQCMMDITLNSNNTMIPFATKKEMKSVTIKATYKEDIIRFRVSLNCGIVELQEEISKRLKLEIGAFDIKYLDDDNEWVLISCDADLQECMDVLTSSGSNMIRLVVHDTVSILGSSCESSGN

SEQ ID NO: 396 - protein, 900 aa, Arachis ipaensis
MQKMKGTTTLLLQLQLSLISTRYSLTSYDVEVKGDSNSVTEKPVENANDEDKKLLPPIVAMPPLEILDRYCVIKERMTQALRYFKELTEQNVLAQVWAPVRNGNRFVLTTSGQPFVLDPHSNGLHQYRTVSLMYVFSADGEKEESLGLPGRVYQQKVPEWTPDVQYYSTKEYPRRDHAQHYNVRGTLALPVFEPSMQSCVGVLELIMTSQKINYAPEVDKICRALEAVNLKSSEILGHQYTQICNEGRQNALAEILEILTVVCETHNLPLAQTWVPCRHRSVLAHGGGLKKSCSSFDGSCMGKVCMSTTDIAFYIIDAHLWGFREACVEHHLQQGQGVAGRAFSSHSMSFCRNITRFCKIDYPLVHYALMFGLTSSFSICLRSSHTGDDDYVLEFFLPPRITDFNEQKALLGSILTIMKQHFQSLKIASGVELEQNALVETIEATIEGVHLRFESIPVRQDASPNVREELAQDPSLQKIMMGCNDGGSIGDQIPSLETKNTNKPSERKRGKTEKSISLEVLQRYFAGSLKDAAKSLGVCPTTMKRICRQHGISRWPSRKINKVNRSLSKLKRVIESVQGAEGAFTLNPLSTSPLPFPEHSTPNKFSQQASPTEPQIRENELDASKVLETTRIARAQCLEKMVNDKSGSIREVGKETKGPRAKSCSSADSTNPTSHGSCHGSPPIESSPVKDIFITSNNDQCVGLRSPEATMQPPNNTLSYPTTCAMPDMVATELQEPFGGMLVEDAGSSKDLRNLCPSVAEAIVEDMAPEPCRTNPPFSGLAPKQCMDPLKETVTPFASRKEMKTVTIKATYREDIIRFRVSLNCGIVELKEEVAKRLKLEVGTFDIKYLDDDHEWVLIACDADLQECIDVSRSSASNIIRVLVHEITSHLGSSCESSGE

SEQ ID NO: 397 - protein, 840 aa, Arachis ipaensis
MPPLEILDRYCVIKERMTQALRYFKELTEQNVLAQVWAPVRNGNRFVLTTSGQPFVLDPHSNGLHQYRTVSLMYVFSADGEKEESLGLPGRVYQQKVPEWTPDVQYYSTKEYPRRDHAQHYNVRGTLALPVFEPSMQSCVGVLELIMTSQKINYAPEVDKICRALEAVNLKSSEILGHQYTQICNEGRQNALAEILEILTVVCETHNLPLAQTWVPCRHRSVLAHGGGLKKSCSSFDGSCMGKVCMSTTDIAFYIIDAHLWGFREACVEHHLQQGQGVAGRAFSSHSMSFCRNITRFCKIDYPLVHYALMFGLTSSFSICLRSSHTGDDDYVLEFFLPPRITDFNEQKALLGSILTIMKQHFQSLKIASGVELEQNALVETIEATIEGVHLRFESIPVRQDASPNVREELAQDPSLQKIMMGCNDGGSIGDQIPSLETKNTNKPSERKRGKTEKSISLEVLQRYFAGSLKDAAKSLGVCPTTMKRICRQHGISRWPSRKINKVNRSLSKLKRVIESVQGAEGAFTLNPLSTSPLPFPEHSTPNKFSQQASPTEPQIRENELDASKVLETTRIARAQCLEKMVNDKSGSIREVGKETKGPRAKSCSSADSTNPTSHGSCHGSPPIESSPVKDIFITSNNDQCVGLRSPEATMQPPNNTLSYPTTCAMPDMVATELQEPFGGMLVEDAGSSKDLRNLCPSVAEAIVEDMAPEPCRTNPPFSGLAPKQCMDPLKETVTPFASRKEMKTVTIKATYREDIIRFRVSLNCGIVELKEEVAKRLKLEVGTFDIKYLDDDHEWVLIACDADLQECIDVSRSSASNIIRVLVHEITSHLGSSCESSGE

SEQ ID NO: 398 - protein, 909 aa, Cajanus cajan
MDFDIGLESPWPLDHVSLVSNPMSPFLLSTISEQPFSPVWAFSDVEDDRQIRIAASGNTNTTNENPVENDANKKTVSPLVALPPSENPDGYCLIKERMTQALRHFKELTEQNVLAQVWAPVRNGNRYALTTSGQPFVLDPHSNGLHQYRTVSLMYMFSVDGENDEIQGLPGRVFQHKIPEWTPNVQYYSSKEYQRLNHAQHYNVRGTLALPVFEPAGQSCVAVLELIMTSQKINYAPEVDKICKALEAVNLRSSEILEHPYNQICNEDRQYALAEILEILTVVCETHSLPLAQTWVPCKHRSVLAHGGGVKKSCSSFDGCCMGQVCMSITEVAFYVIDARTWGFHEACVEHHLQQGQGVAGRAFLSHKMCFCGNITQFCKTEYPLVHYAIMFGLTSCFAVCLQSSHTGNDEYVLEFFLPPMITDFNEQKSLLGSILATMKPHFQSFKIAAGVELEENGSVEIVEAINERVHLRFESIPITQSSKSPPRHALPNMGEALPPEPSEQQIMAYCDDINDGGSLGDNAGGHIDQNTLLETKTKKKPSERKRGKAEKSISLDILQHYFTGSLKDAAKSLGVCPTTMKRICRQHGISRWPSRKIKKVNRSLSKLKCVIESVHGAEGAFGLNSLSTSSLPIAAGSFSEPSTSNKQIEMGEQFLGARTQSPEKLINDKVGTIQEIGTKGSNKLRTGSGSSEGSANPTPHGSCQGSPPNEISPTKDIFIAGNNEQCLVLRGSLESTLLSTRTSTPNRPTAYPMPNIVDTTEPQVPFVGQLLEGAGSSKDLRNLCPSADAVLEDQVPEACRMNPQRVKSVTIKATYKEDIIRFKVSLDCGIVELKEEIAKRLKLEVVTFDIKYLDDDHEWVLIACDADLLECMDISSSSGSNIIRLVVHDILSILGSSCESSGDWKGCI

SEQ ID NO: 399 - protein, 802 aa, Cajanus cajan
MSESEEENPDCVPRSKAEEEGGCNMDFDLELESSWPLDHMSFVSNPMSPFLFSNTSDQPYSPLWAFSDGEDERHPRFPASAFSDCHKIFSCDSNSVAEKPVENDDHKKLLPPLVPMPPVDTLDGYCVIKERMTQALRYFKELTELNVLAQVWAPVRNGNRFVLTTSGQPFVLDPHSNGLNQYRTVSLMYMFSVDGENDGSLGLPGRVFQQKLPEWTPNVLYYSSKEYPRRDYAQHYNVRGTLALPVFEPSMQSCLGVLELIMTSPKINYAPEVDKICKALETVNLRSSEILDQPYNITLAMLLNQICNEGRQNALSEILEILTVVCETHNLPLAQTWIPCRHRSVLAQGGGLKKSCSSFDGSCMGKVCMSTTDIAFYIIDAHLWGFRDACVEHHLQQGQGVAGRAFLSHNMCFCSNITQFCKTDYPLVHYALMFGLTSCFAICLRSSHTGNDDYVLEFFLPPRVTDFHEQKTLLGSILASVKQHFQSLKIASGVELEDCSIEIVEATIERVHTRFESIPIAPSIKSPTRHDTSPNMGRNIEHIPSLEAKNIKKPSERKRGKTEKSISLEVLQRYFAGSLKDAAKSLGVCPTTMKRICRQHGISRWPSRKINKVNRSLSKLKRVIESVQGAEGAFGLNSLSPSPLPIAVGSFPEPFPYPMPDFASTELQEPFGGMLIEDAGLDLSPKQSMDTPNKAVTPFAARKEMKTVTIKATYREDIIRFRVPLTCGIVELKEEVAKRLKLEVGTFDIKYLDDDHEWVLIACDADLQECMDVSRSSGSNIIRVLVHDITSNLGSSCESSGE

SEQ ID NO: 400 - protein, 988 aa, Cajanus cajan
MSESKEENHDLPPKSKPLEEHGFAMDFDIGLESPWPLDHVSLVSNPMSPFLLSTISEQPFSPVWAFSDVEDDRQIRIAASGNTNTTNENPVENDANKKTVSPLVALPPSENPDGYCLIKERMTQALRHFKELTEQNVLAQVWAPVRNGNRYALTTSGQPFVLDPHSNGLHQYRTVSLMYMFSVDGENDEIQGLPGRVFQHKIPEWTPNVQYYSSKEYQRLNHAQHYNVRGTLALPVFEPAGQSCVAVLELIMTSQKINYAPEVDKICKALEAVNLRSSEILEHPYNQICNEDRQYALAEILEILTVVCETHSLPLAQTWVPCKHRSVLAHGGGVKKSCSSFDGCCMGQVCMSITEVAFYVIDARTWGFHEACVEHHLQQGQGVAGRAFLSHKMCFCGNITQFCKTEYPLVHYAIMFGLTSCFAVCLQSSHTGNDEYVLEFFLPPMITDFNEQKSLLGSILATMKPHFQSFKIAAGVELEENGSVEIVEAINERVHLRFESIPITQSSKSPPRHALPNMGEALPPEPSEQQIMAYCDDINDGGSLGDNAGGHIDQNTLLETKTKKKPSERKRGKAEKSISLDILQHYFTGSLKDAAKSLGVCPTTMKRICRQHGISRWPSRKIKKVNRSLSKLKCVIESVHGAEGAFGLNSLSTSSLPIAAGSFSEPSTSNKFNCQNSLTIRPSEPKTDENDFDASRASETNRQIEMGEQFLGARTQSPEKLINDKVGTIQEIGTKGSNKLRTGSGSSEGSANPTPHGSCQGSPPNEISPTKDIFIAGNNEQCLVLRGSLESTLLSTRTSTPNRPTAYPMPNIVDTTEPQVPFVGQLLEGAGSSKDLRNLCPSADAVLEDQVPEACRMNPQRSDLAPMQHMNTLYNNVPPFPVRKGVKSVTIKATYKEDIIRFKVSLDCGIVELKEEIAKRLKLEVVTFDIKYLDDDHEWVLIACDADLLECMDISSSSGSNIIRLVVHDILSILGSSCESSGDWKGCI

SEQ ID NO: 401 - protein, 989 aa, Cajanus cajan
MSESEEENPDCVPRSKAEEEGGCNMDFDLELESSWPLDHMSFVSNPMSPFLFSNTSDQPYSPLWAFSDGEDERHPRFPASAFSDCHKIFSCDSNSVAEKPVENDDHKKLLPPLVPMPPVDTLDGYCVIKERMTQALRYFKELTELNVLAQVWAPVRNGNRFVLTTSGQPFVLDPHSNGLNQYRTVSLMYMFSVDGENDGSLGLPGRVFQQKLPEWTPNVLYYSSKEYPRRDYAQHYNVRGTLALPVFEPSMQSCLGVLELIMTSPKINYAPEVDKICKALETVNLRSSEILDQPYNQICNEGRQNALSEILEILTVVCETHNLPLAQTWIPCRHRSVLAQGGGLKKSCSSFDGSCMGKVCMSTTDIAFYIIDAHLWGFRDACVEHHLQQGQGVAGRAFLSHNMCFCSNITQFCKTDYPLVHYALMFGLTSCFAICLRSSHTGNDDYVLEFFLPPRVTDFHEQKTLLGSILASVKQHFQSLKIASGVELEDCSIEIVEATIERVHTRFESIPIAPSIKSPTRHDTSPNMGEEVPQDPSEQQMLMYCNDINDGGSLGDNAGRNIEHIPSLEAKNIKKPSERKRGKTEKSISLEVLQRYFAGSLKDAAKSLGVCPTTMKRICRQHGISRWPSRKINKVNRSLSKLKRVIESVQGAEGAFGLNSLSPSPLPIAVGSFPEPCTPNKFSQPASLTMRPSEPQMKENELNASKAVETTGMEDQFLGGRTQNLAKVINDKGVTTWEVAKEPKRTRTGSGSSEDSTNPTSHGSCHDSPPNESSPVKDIFITSNNDQCAVLRGSPESIMQPTNNTPNQPVPYPMPDFASTELQEPFGGMLIEDAGSSKDLRNLCPLVAEAILEDLVPEACGTINPPGLDLSPKQSMDTPNKAVTPFAARKEMKTVTIKATYREDIIRFRVPLTCGIVELKEEVAKRLKLEVGTFDIKYLDDDHEWVLIACDADLQECMDVSRSSGSNIIRVLVHDITSNLGSSCESSGE

SEQ ID NO: 402 - protein, 945 aa, Cajanus cajan
MSESEEENPDCVPRSKAEEEGGCNMDFDLELESSWPLDHMSFVSNPMSPFLFSNTSDQPYSPLWAFSDGEDERHPRFPASAFSDCHKIFSCDSNSVAEKPVENDDHKKLLPPLVPMPPVDTLDGYCVIKERMTQALRYFKELTELNVLAQVWAPVRNGNRFVLTTSGQPFVLDPHSNGLNQYRTVSLMYMFSVDGENDGSLGLPGRVFQQKLPEWTPNVLYYSSKEYPRRDYAQHYNVRGTLALPVFEPSMQSCLGVLELIMTSPKINYAPEVDKICKALETVNLRSSEILDQPYNQICNEGRQNALSEILEILTVVCETHNLPLAQTWIPCRHRSVLAQGGGLKKSCSSFDGSCMGKVCMSTTDIAFYIIDAHLWGFRDACVEHHLQQGQGVAGRAFLSHNMCFCSNITQFCKTDYPLVHYALMFGLTSCFAICLRSSHTGNDDYVLEFFLPPRVTDFHEQKTLLGSILASVKQHFQSLKIASGVELEDCSIEIVEATIERVHTRFESIPIAPSIKSPTRHDTSPNMGEEVPQDPSEQQMLMYCNDINDGGSLGDNAGRNIEHIPSLEAKNIKKPSERKRGKTEKSISLEVLQRYFAGSLKDAAKSLGVCPTTMKRICRQHGISRWPSRKINKVNRSLSKLKRVIESVQGAEGAFGLNSLSPSPLPIAVGSFPEPCTPNKFSQPASLTMRPSEPQMKENELNASKAVETTGMEDQFLGGRTQNLAKVINDKGVTTWEVAKEPKRTRTGSGSSEDSTNPTSHGSCHDSPPNESSPVKDIFITSNNDQCAVLRGSPESIMQPTNNTPNQPVPYPMPDFASTELQEPFGGMLIEDAGSSKDLRNLCPLVAEAILEDLVPEACGTINPPGLDLSPKQSMDTPNKAVTPFAARKEMKTVTIKATYREDIIRFRVPLTCGIVELKEEVAKRLKLETCRSAWMFQDHQGAT

SEQ ID NO: 403 - protein, 1045 aa, Cannabis sativa
MSESEEEAPPPPPPSTTATIASNTVSFPPKSSKEVLMDFDLDLDNPWPMDQIAFVSNPMSPLLFSSSSADHPFSPLWAFADAENEENNHNNSNNHNSNNNTNNCNSNNNNSSNSNNNSNKFGRHANSTPMADSSRFSCNSNSVAQRPVGNEENRSLPSPFSGLVPVDNPNGYYWIKERMTQALRYLKESTDQHVLAQVWAPVKNGCRYVLSTSGQPFVLDPDSNGLHQYRMVSLMYSFSVDGGETNEVLGLPGRVFRQKLPEWTPNVQYYSITEYPRLDHAQHYNVRGSLALPVFEPSGQSCVGVLELIMTSEKINYAPEVDKVCKALEAVNLRSAEILDHTDTQICNEGRQSALTEILEILTAACETHKLPMAQTWVPCMHRNVLAYGGGLKKNCTSIDGSCMGQVCMSTTEVAFYIVDARMWGFREACLEHHLQKGQGVAGRAFYSRNLCFSSDITQFCKNEYPLVHYARMFELTSCFAVCLQSSHTGNDNYVLEFFLPPNTNPSEQHTILGSLLATMKKHFQSLKVASGIGLEEEGIVEVVRVSANGGLESNLECIRIPQIAESPQGHSALPNGGDMVQRDLMKQPSTVEHDSANGGQDTAHDGGNMNHGSVSDHKETKKSERKRGKTEKSISLEVLQQYFAGSLKDAAKSLGVCPTTMKRICRQHGISRWPSRKINKVNRSLSKLKRVIESVQGAEGAFGLTPIATSPLPVPVTSISRPSTSNGTNQQNSPCHVHYDPPLERKDSPTNSSCRRGQTEIEDQLQGGGILIQKDLVQENGGFYIPENNRGSNHSKSGSGSREVSVGTPTSHGSCQGSPANGNIMLKDPFSYSIQEQCIKVEGSPEPTPQPTNGLIFSVPEALVTAESQEPFGAMLVEDAGSSKDLRNLCHASDAILDESVPEYCWMNPPPLPPRSDFAAPKDTTTTTTDIIITQTQPNVNRVSQEMRSVTIKATYREDIIRFRLSLSCNIVELREEVAKRLKMEVGIFDIKYMDDDQEWVLIACDADLQECMDVCRSSGCNMIRLLIHDIMPNLGSSCESTEE

SEQ ID NO: 404 - protein, 976 aa, Cicer arietinum
MAESEEENQEFLPKTKTSSLEEHGCCAMDFDLDLETSWPLDHMSFVSNPMSPFQFSTISDQPSSPLWAFTDGEDDKHVKLAASALSDCHKIFSSDSNSITEKPVENDENKKHLPPLVPPIENLNGYCAIKEKMTQALRYFKEWTELNVLAQVWAPVRNGNRYMLTTSGQPFVLDDPHSNGLCQYRTVSLMYMFSVDGENDGTLGLPGRVFQQKLPEWSPNVQYYTSKEYPRRYYAQHYNVRGTLALPVFETSLQSCIGVLELIMTSPKINYAPEVEKICKALEAVNLRSSEILDYPYTQICNEGRQNALSEILEILTVVCETHNLPLAQTWVPCRHRSILAHGGGLKKSCSSFDGSCMGQVCMSTTEVALYIIDPHLWGFREACVEHHLQQGQGVAGRAFLSQNMSFCTNITQFCKTDYPLVHYALMFGLTSCFSICLRSSHTGNDYYVLEFFLPPNITEFHEQKTLLGSILAIMKQHFQSLKIAAGVELGEDGSIEIIEAMDESVHIRIESIPIVQSIKSPPRPDASPNMEEDKVPQDPSDIQGENIGGNIDQVSFLGNKNVKKPSERKRGKTEKSISLEVLQRYFAGSLKDAAKSLGVCPTTMKRICRQHGISRWPSRKINKVNRSLSKLKRVIESVQGGEGAFDLNSLNTNQLPIVSSFPEPSTPNTSNQQASLSIRPSEPQIKENGIDASKVSETNIEVVMEDQLLGGRKRSLGKEVIINDKGVPVQKVRARSGSSGDSTNPISHDSCHGSPPIESSTIKEIFIPSNNEQCVALKGSPESRVQPTNGFNSASAYRMPDNVIAELEEPFGGMLIEDAGSSKDLRNLCPSVAEAILEDMAPEPCGTNLPGSSYLAPKQCMDTINTSTTPFAARKEMKTVTIKATYREDIIRFRVTLTCGIVELKEEIAKRLKLEVGTFDVKYLDDDHEWVLIACDADLQECIDVTRSSGGSNIIRVLVHDITSNLGSAYESSGE

SEQ ID NO: 405 - protein, 911 aa, Citrus clementina
MLINTGNPNSETENPKDNDENRRFPSPLSALMPLENPDGYCMIKERITQALRYFKDSTEQHVLAQVWVPVKVGGRYVLTTSGQPFVLDPHSNGLHQYRMVSLMYMFSVDGESDGELGLPGRVFWQKLPEWTPNVQYYSSKEYSRLDHALHHNVRGTMALPVFEPSGQSCVAVIELIMTSQKINYAPEVDKVCKALEAVNLKSSEILDYPSTQICNEGRQNALAEILEILSVVCETHKLPLAQTWVPCRHRSVLAYGGGLKKSCSSIDGSCMGQVCMSTTDVAFYVVDGHMWGFREACVEHHLQKDQGVAGRAFFSLSSCFCKDITQFCKTEYPLVHYARMFGLTSCFAICLRSTYTGDDDYILEFFLPPAITDSYEQQTLLGSILATMKQHFQSLKVASGIDLEDDEGTIEIIEGEATADKKLNLRMESIRIPQSVRSPPQPHALPNGGELGQLDIPEQQLMENFDYMNSRGNAVNVGGNDNPVSLLENKNTRKPSERKRGKTEKSISLEVLQQYFAGSLKDAAKSLGVCPTTMKRICRQHGISRWPSRKINKVNRSLTKLKRVIESVQGTNGTFGLTSLTTSPLPVAVNSISWPSGLNGSNQQNSPNSKPELLGEKILSPIYKTPGSDGHTELEDRLSGGRMSTHEEHIHEQNALSPEIGKGKNSPKTGSGSREESAGSPTSHGSCQGNPANESAPAKDVLVSSIHEPRFKVGGSLELVFQPVGEMNLSAAFSIPDALVTTEPQEPFGGLLVEDAGSSKDLRNLCPAVADAIVDERLPENSCANLPCAELSPKQHLATLSQTMPRVYSRQEMKSVTIKATYREDIIRFRISLSCGILELKEEVAKRLKLELGTFDIKYLDDDQEWVLIACDADLQECLDISRSSGSNMIRLSIHDIMANLGSSCESTGEL

SEQ ID NO: 406 - protein, 943 aa, Citrus clementina
MSPFLISEQPCSPLWAFSDADNDDKLSGHVNYPLFLKCNPNSETENPKDNDENRRFPSPLSALMPLENPDGYCMIKERITQALRYFKDSTEQHVLAQVWVPVKVGGRYVLTTSGQPFVLDPHSNGLHQYRMVSLMYMFSVDGESDGELGLPGRVFWQKLPEWTPNVQYYSSKEYSRLDHALHHNVRGTMALPVFEPSGQSCVAVIELIMTSQKINYAPEVDKVCKALEAVNLKSSEILDYPSTQICNEGRQNALAEILEILSVVCETHKLPLAQTWVPCRHRSVLAYGGGLKKSCSSIDGSCMGQVCMSTTDVAFYVVDGHMWGFREACVEHHLQKDQGVAGRAFFSLSSCFCKDITQFCKTEYPLVHYARMFGLTSCFAICLRSTYTGDDDYILEFFLPPAITDSYEQQTLLGSILATMKQHFQSLKVASGIDLEDDEGTIEIIEGEATADKKLNLRMESIRIPQSVRSPPQPHALPNGGELGQLDIPEQQLMENFDYMNSRGNAVNVGGNDNPVSLLENKNTRKPSERKRGKTEKSISLEVLQQYFAGSLKDAAKSLGVCPTTMKRICRQHGISRWPSRKINKVNRSLTKLKRVIESVQGTNGTFGLTSLTTSPLPVAVNSISWPSGLNGSNQQNSPNSKPELLGEKILSPIYKTPGSDGHTELEDRLSGGRMSTHEEHIHEQNALSPEIGKGKNSPKTGSGSREESAGSPTSHGSCQGNPANESAPAKDVLVSSIHEPRFKVGGSLELVFQPVGEMNLSAAFSIPDALVTTEPQEPFGGLLVEDAGSSKDLRNLCPAVADAIVDERLPENSCANLPCAELSPKQHLATLSQTMPRVYSRQEMKSVTIKATYREDIIRFRISLSCGILELKEEVAKRLKLELGTFDIKYLDDDQEWVLIACDADLQECLDISRSSGSNMIRLSIHDIMANLGSSCESTGEL

SEQ ID NO: 407 - skipped

SEQ ID NO: 408 - protein, 876 aa, Citrus sinensis
NPDGYCMIKERITQALRYFKDSTEQHVLAQVWVPVKVGGRYVLTTSGQPFVLDPHSNGLHQYRMVSLMYMFSVDGESDGELGLPGRVFWQKLPEWTPNVQYYSSKEYSRLDHALHHNVRGTMALPVFEPSGQSCVAVIELIMTSQKINYAPEVDKVCKALEAVNLKSSEILDYPSTQICNEGRQNALAEILEILSVVCETHKLPLAQTWVPCRHRSVLAYGGGLKKSCSSIDGSCMGQVCMSTTDVAFYVVDGHMWGFREACVEHHLQKDQGVAGRAFFSLSSCFCKDITQFCKTEYPLVHYARMFGLTSCFAICLRSTYTGDDDYILEFFLPPAITDSYEQQTLLGSILATMKQHFQSLKVASGIDLEDDEGTIEIIEGEATADKKLNLRMESIRIPQSVRSPPQPHALPNGGELGQLDIPEQQLMENFDYMNSRGNAVNVGGNDNPVSLLENKNTRKLSERKRGKTEKSISLEVLQQYFAGSLKDAAKSLGVCPTTMKRICRQHGISRWPSRKINKVNRSLTKLKRVIESVQGTNGTFGLTSLTTSPLPVAVNSISWPSGLNGSNQQNSPNSKPELLGEKILSPIYKTPGSDGHTELEDRLSGGRMSTHEEHIHEQNALSPEIGKGKNSPKTGSGSREESDGSPTSHGSCQGNPANESAPAKDVLVSSIHEPRFKVGGSLELVFQPVKEMNLSAAFSIPDALVTTEPQEPFGGLLVEDAGSSKDLRNLCPAVADAIVDERLPENSCANLPCAELSPKQHLATLSQTMPRVYSRQEMKSVTIKATYREDIIRFRISLSCGILELKEEVAKRLKLELGTFDIKYLDDDQEWVLIACDADLQECLDISRSSGSNMIRLSIHDIMANLGSSCESTGEL

SEQ ID NO: 409 - protein, 704 aa, Citrus sinensis
MLLNQICNEGRQNALAEILEILSVVCETHKLPLAQTWVPCRHRSVLAYGGGLKKSCSSIDGSCMGQVCMSTTDVAFYVVDGHMWGFREACVEHHLQKDQGVAGRAFFSLSSCFCKDITQFCKTEYPLVHYARMFGLTSCFAICLRSTYTGDDDYILEFFLPPAITDSYEQQTLLGSILATMKQHFQSLKVASGIDLEDDEGTIEIIEGEATADKKLNLRMESIRIPQSVRSPPQPHALPNGGELGQLDIPEQQLMENFDYMNSRGNAVNVGGNDNPVSLLENKNTRKLSERKRGKTEKSISLEVLQQYFAGSLKDAAKSLGVCPTTMKRICRQHGISRWPSRKINKVNRSLTKLKRVIESVQGTNGTFGLTSLTTSPLPVAVNSISWPSGLNGSNQQNSPNSKPELLGEKILSPIYKTPGSDGHTELEDRLSGGRMSTHEEHIHEQNALSPEIGKGKNSPKTGSGSREESDGSPTSHGSCQGNPANESAPAKDVLVSSIHEPRFKVGGSLELVFQPVKEMNLSAAFSIPDALVTTEPQEPFGGLLVEDAGSSKDLRNLCPAVADAIVDERLPENSCANLPCAELSPKQHLATLSQTMPRVYSRQEMKSVTIKATYREDIIRFRISLSCGILELKEEVAKRLKLELGTFDIKYLDDDQEWVLIACDADLQECLDISRSSGSNMIRLSIHDIMANLGSSCESTGEL

SEQ ID NO: 410 - protein, 641 aa, Citrus sinensis
MGQVCMSTTDVAFYVVDGHMWGFREACVEHHLQKDQGVAGRAFFSLSSCFCKDITQFCKTEYPLVHYARMFGLTSCFAICLRSTYTGDDDYILEFFLPPAITDSYEQQTLLGSILATMKQHFQSLKVASGIDLEDDEGTIEIIEGEATADKKLNLRMESIRIPQSVRSPPQPHALPNGGELGQLDIPEQQLMENFDYMNSRGNAVNVGGNDNPVSLLENKNTRKLSERKRGKTEKSISLEVLQQYFAGSLKDAAKSLGVCPTTMKRICRQHGISRWPSRKINKVNRSLTKLKRVIESVQGTNGTFGLTSLTTSPLPVAVNSISWPSGLNGSNQQNSPNSKPELLGEKILSPIYKTPGSDGHTELEDRLSGGRMSTHEEHIHEQNALSPEIGKGKNSPKTGSGSREESDGSPTSHGSCQGNPANESAPAKDVLVSSIHEPRFKVGGSLELVFQPVKEMNLSAAFSIPDALVTTEPQEPFGGLLVEDAGSSKDLRNLCPAVADAIVDERLPENSCANLPCAELSPKQHLATLSQTMPRVYSRQEMKSVTIKATYREDIIRFRISLSCGILELKEEVAKRLKLELGTFDIKYLDDDQEWVLIACDADLQECLDISRSSGSNMIRLSIHDIMANLGSSCESTGEL

SEQ ID NO: 411 - protein, 998 aa, Citrus sinensis
MPEPDKENQTRYMPPAPPRTKEVTFMASSIMDVDVVDLDLDNPWPSDQMGFVSNPMSPFLISEQPCSPLWAFSDADNDDKLSGHVNYPLFLKCNPNSETENPKDNDENRRFPSPLSAVMPLENPDGYCMIKERITQALRYFKDSTEQHVLAQVWVPVKVGGRYVLTTSGQPFVLDPHSNGLHQYRMVSLMYMFSVDGESDGELGLPGRVFWQKLPEWTPNVQYYSSKEYSRLDHALHHNVRGTMALPVFEPSGQSCVAVIELIMTSQKINYAPEVDKVCKALEAVNLKSSEILDYPSTQICNEGRQNALAEILEILSVVCETHKLPLAQTWVPCRHRSVLAYGGGLKKSCSSIDGSCMGQVCMSTTDVAFYVVDGHMWGFREACVEHHLQKGQGVAGRAFFSLSSCFCKDITQFCKTEYPLVHYARMFGLTSCFAICLRSTYTGDDDYILEFFLPPAITDSYEQQTLLGSILATMKQHFQSLKVASGIDLEDDEGTIEIIEGEATADKKLNLRMESIRIPQSVRSPPQPHALPNGGELGQLDIPEQQLMENFDYMNSRGNAVNVGGNDNPVSLLENKNTRKLSERKRGKTEKSISLEVLQQYFAGSLKDAAKSLGVCPTTMKRICRQHGISRWPSRKINKVNRSLTKLKRVIESVQGTNGTFGLTSLTTSPLPVAVNSISWPSGLNGSNQQNSPNSKPELLGEKILSPIYKTPGSDGHTELEDRLSGGRMSTHEEHIHEQNALSPEIGKGKNSPKTGSGSREESDGSPTSHGSCQGNPANESAPAKDVLVSSIHEPRFKVGGSLELVFQPVKEMNLSAAFSIPDALVTTEPQEPFGGLLVEDAGSSKDLRNLCPAVADAIVDERLLENSCANLPCTELSPKQHLATLSQTMPRVYSRQEMKSVTIKATYREDIIRFRISLSCGILELKEEVAKRLKLELGTFDIKYLDDDQEWVLIACDADLQECLDISRSSGSNMIRLSIHDIMANLGSSCESTGEL

SEQ ID NO: 412 - protein, 998 aa, Citrus trifoliata
MPEPDKENQTRYMPPAPPRTKEVTFMASSIMDVDVVDLDLDNPWPSDQMGFVSNPMSPFLISEQPCSPLWAFSDADNDDKLSGHVNYPLFLKCNPNSETENPKDNDENRRFPSPLSALMPLENPDGYCMIKERITQALRHFKDSTEQHVLAQVWVPVKVGGRYVLTTSGQPFVLDPHSNGLHQYRMVSLMYMFSVDGESDGELGLPGRVFWQKLPEWTPNVQYYSSKEYSRLDHALHHNVRGTMALPVFEPSGQSCVAVIELIMTSQKINYAPEVDKVCKALEAVNLKSSEILDYPSTQICNEGRQNALAEILEILSVVCETHKLPLAQTWVPCRHRSVLAYGGGLKKSCSSIDGSCMGQVCMSTTDVAFYVVDGHMWGFREACVEHHLQKGQGVAGRAFFSLSSCFCKDITQFCKTEYPLVHYARMFGLTSCFAICLRSTYTGDDDYILEFFLPPAITDSYEQQTLLGSILATMKQHFQSLKVASGIDLEDDEGTIEIIEGEATADKKLNLRMESIRIPQSVRSPSQPHALPNGGELGQLDIPEQQLMENFDYMNSRGNAVNVGGNDNPVSLLENKNTRKPSERKRGKTEKSISLEVLQQYFAGSLKDAAKSLGVCPTTMKRICRQHGISRWPSRKINKVNRSLTKLKRVIESVQGTNGTFGLTSLTTSPLPVAVNSISWPSGLNGSNQQNSPNSKPELLGEKILSPIYKTPGSDGHTELEDRLSGGRMSTHEEHIHEQNALSPEIGKGKNSPKTGSGSREESAGSPTSHGSCQGNPANESAPAKDVLVSSIHEPRFKVGGSLELVFQPVGEMNLSAAFSIPDALVTTEPQEPFGGLLVEDAGSSKDLRNLCPLVADAIVDERLPENSCANLPCAELSPKQHLATLSQTMPRVYSRQEMKSVTIKATYREDIIRFRISLSCGIHELKEEVAKRLKLELGTFDIKYLDDDQEWVLIACDADLQECLDISRSSGSNMIRLSIHDIMANLGSSCESTGEL

SEQ ID NO: 413 - protein, 1029 aa, Citrus unshiu
PQPKPGIMPEPDEENQTRYMPPAPPRTKEVTFMASSIMDVDVVDLDLDNPWPSDQMGFVSNPMSPFLISEQPCSPLWAFSDADNDDKLSGHVNYPLFLKCNPNSETENPKDNDENRRFPSPLSALMPLENPDGYCMIKERITQALRYFKDSTEQHVLAQVWVPVKVGGRYVLTTSGQPFVLDPHSNGLHQYRMVSLMYMFSVDGESDGELGLPGRVFWQKLPEWTPNVQYYSSKEYSRLDHALHHNVRGTMALPVFEPSGQSCVAVIELIMTSQKINYAPEVDKVCKALEAVNLKSSEILDYPSTQINLLFFFFCLCSHRCIYLAMLLNQICNEGRQNALAEILEILSVVCETHKLPLAQTWVPCRHRSVLAYGGGLKKSCSSIDGSCMGQVCMSTTDVAFYVVDGHMWGFREACVEHHLQKDQGVAGRAFFSLSSCFCKDITQFCKTEYPLVHYARMFGLTSCFAICLRSTYTGDDDYILEFFLPPAITDSYEQQTLLGSILATMKQHFQSLKVASGIDLEDDEGTIEIIEGEATADKKLNLRMESIRIPQSVRSPPQPHALPNGGELGQLDIPEQQLMENFDYMNSRGNAVNVGGNDNPVSLLENKNTRKLSERKRGKTEKSISLEVLQQYFAGSLKDAAKSLGVCPTTMKRICRQHGISRWPSRKINKVNRSLTKLKRVIESVQGTNGTFGLTSLTTSPLPVAVNSISWPSGLNGSNQQNSPNSKPELLGEKILSPIYKTPGSDGHTELEDRLSGGRMSTHEEHIHEQNALSPEIGKGKNSPKTGSGSREESDGSPTSHGSCQGNPANESAPAKDVLVSSIHEPRFKVGGSLELVFQPVGEMNLSAAFSIPDALVTTEPQEPFGGLLVEDAGSSKDLRNLCPAVADAIVDERLPENSCANLPCAELSPKQHLATLSQTMPRVYSRQEMKSVTIKATYREDIIRFRISLSCGILELKEEVAKRLKLELGTFDIKYLDDDQEWVLIACDADLQECLDISRSSGSNMIRLSIHDIMANLGSSCESTGEL

SEQ ID NO: 414 - protein, 1005 aa, Citrus unshiu
PQPKPGIMPEPDEENQTRYMPPAPPRTKEVTFMASSIMDVDVVDLDLDNPWPSDQMGFVSNPMSPFLISEQPCSPLWAFSDADNDDKLSGHVNYPLFLKCNPNSETENPKDNDENRRFPSPLSALMPLENPDGYCMIKERITQALRYFKDSTEQHVLAQVWVPVKVGGRYVLTTSGQPFVLDPHSNGLHQYRMVSLMYMFSVDGESDGELGLPGRVFWQKLPEWTPNVQYYSSKEYSRLDHALHHNVRGTMALPVFEPSGQSCVAVIELIMTSQKINYAPEVDKVCKALEAVNLKSSEILDYPSTQICNEGRQNALAEILEILSVVCETHKLPLAQTWVPCRHRSVLAYGGGLKKSCSSIDGSCMGQVCMSTTDVAFYVVDGHMWGFREACVEHHLQKDQGVAGRAFFSLSSCFCKDITQFCKTEYPLVHYARMFGLTSCFAICLRSTYTGDDDYILEFFLPPAITDSYEQQTLLGSILATMKQHFQSLKVASGIDLEDDEGTIEIIEGEATADKKLNLRMESIRIPQSVRSPPQPHALPNGGELGQLDIPEQQLMENFDYMNSRGNAVNVGGNDNPVSLLENKNTRKLSERKRGKTEKSISLEVLQQYFAGSLKDAAKSLGVCPTTMKRICRQHGISRWPSRKINKVNRSLTKLKRVIESVQGTNGTFGLTSLTTSPLPVAVNSISWPSGLNGSNQQNSPNSKPELLGEKILSPIYKTPGSDGHTELEDRLSGGRMSTHEEHIHEQNALSPEIGKGKNSPKTGSGSREESDGSPTSHGSCQGNPANESAPAKDVLVSSIHEPRFKVGGSLELVFQPVGEMNLSAAFSIPDALVTTEPQEPFGGLLVEDAGSSKDLRNLCPAVADAIVDERLPENSCANLPCAELSPKQHLATLSQTMPRVYSRQEMKSVTIKATYREDIIRFRISLSCGILELKEEVAKRLKLELGTFDIKYLDDDQEWVLIACDADLQECLDISRSSGSNMIRLSIHDIMANLGSSCESTGEL

SEQ ID NO: 415 - protein, 1004 aa, Citrus unshiu
MPEPDEENQTRYMPPAPPRTKEVTFMASSIMDVDVVDLDLDNPWPSDQMGFVSNPMSPFLISEQPCSPLWAFSDADNDDKLSGHVNYPLFLKYIYTCTRNPNSETENPKDNDENRRFPSPLSALMPLENPDGYCMIKERITQALRYFKDSTEQHVLAQVWVPVKVGGRYVLTTSGQPFVLDPHSNGLHQYRMVSLMYMFSVDGESDGELGLPGRVFWQKLPEWTPNVQYYSSKEYSRLDHALHHNVRGTMALPVFEPSGQSCVAVIELIMTSQKINYAPEVDKVCKALEAVNLKSSEILDYPSTQICNEGRQNALAEILEILSVVCETHKLPLAQTWVPCRHRSVLAYGGGLKKSCSSIDGSCMGQVCMSTTDVAFYVVDGHMWGFREACVEHHLQKDQGVAGRAFFSLSSCFCKDITQFCKTEYPLVHYARMFGLTSCFAICLRSTYTGDDDYILEFFLPPAITDSYEQQTLLGSILATMKQHFQSLKVASGIDLEDDEGTIEIIEGEATADKKLNLRMESIRIPQSVRSPPQPHALPNGGELGQLDIPEQQLMENFDYMNSRGNAVNVGGNDNPVSLLENKNTRKLSERKRGKTEKSISLEVLQQYFAGSLKDAAKSLGVCPTTMKRICRQHGISRWPSRKINKVNRSLTKLKRVIESVQGTNGTFGLTSLTTSPLPVAVNSISWPSGLNGSNQQNSPNSKPELLGEKILSPIYKTPGSDGHTELEDRLSGGRMSTHEEHIHEQNALSPEIGKGKNSPKTGSGSREESDGSPTSHGSCQGNPANESAPAKDVLVSSIHEPRFKVGGSLELVFQPVGEMNLSAAFSIPDALVTTEPQEPFGGLLVEDAGSSKDLRNLCPAVADAIVDERLPENSCANLPCAELSPKQHLATLSQTMPRVYSRQEMKSVTIKATYREDIIRFRISLSCGILELKEEVAKRLKLELGTFDIKYLDDDQEWVLIACDADLQECLDISRSSGSNMIRLSIHDIMANLGSSCESTGEL

SEQ ID NO: 416 - skipped

SEQ ID NO: 417 - protein, 1003 aa, Cucumis sativus
MTEPDSDHPSPLFPKSNHRSSSDDRTPLMDFDLDLDIPWPLDQIPSFGSNPMSPFLLSTSDHLASPLWAFSEADDDDDSKFAAYACSVLGTSNSHSVPQKPTENQKFKILPVPSSSWGVLPSENPDGYCLIKEKMAQALRYIKESSDQHVLAQVWAPVKSGGKLVLSTSGQPFFLDSQSNGLHQYRMASLTFSFSLDADQDGYLGLPGRVFQQKLPEWTPNVQYYSSKEYPRLSHALNYNVQGTLALPVFDPSGHSCLGVLELIMTSPKINYAPEVDKVCKALEAVNLKSSEILDHPNNQIQSWQCLSNQICNEGRQNALAEILEVLTVVCETHNLPLAQTWVPCRHRNVLANGGGLKKSCTSFDGSCMGRICMSATEVASYVVDAHMWGFRDACLEHHLQKGQGVSGRAFLSHSSCFCGDVTQFCKTEYPLVHYALMFGLKSCFSICLRSTFTGDDEYILEFFLPPSIVDYQEQKNLLGALMATMKKHFYTLKVASGINLEDKEGLVEIIQASRNGGFDSRFEYIQIPRPVQLPPASDAMPKAVEVAALETLEQQSLMVHDAPKDENNGAWDGESHKSVPCPQNKEVKKTSERKRGKAEKSISLEVLQQYFAGSLKDAAKSLGVCPTTMKRICRQHGISRWPSRKINKVNRSLSKLKRVIESVQGAEGAFGISSLATSPLPVTVSSSSHPLTPEGSNQQNFVASQPSDSQYKETNTPEAQTNDTQARLEDRLHRGVLSPEEPIHEQNGFLPKFGNGLNNFRTGSGSREESAGTPTSHGSCQGSPANDSALANNPISIRQHEQCARRESPEVAFHPIDKLNISAPPCSIPDTLVMVEPEEPFGGMLIEDAGSSKDLKNLCASVADAVLDEQVPEFCWSNHHDIALRQPMDSVCHTVPHISLRQEPRRMTIKATYKEDIIRFRIPLTSGIVELREEVAKRLKLEVGTFDIKYMDDDREWVLIACDADLQECVDISKSSGSNIIRLSVHDLNVNLGSSCESTGGE

SEQ ID NO: 418 - protein, 993 aa, Cucumis sativus
MTEPDSDHPSPLFPKSNHRSSSDDRTPLMDFDLDLDIPWPLDQIPSFGSNPMSPFLLSTSDHLASPLWAFSEADDDDDSKFAAYACSVLGTSNSHSVPQKPTENQKFKILPVPSSSWGVLPSENPDGYCLIKEKMAQALRYIKESSDQHVLAQVWAPVKSGGKLVLSTSGQPFFLDSQSNGLHQYRMASLTFSFSLDADQDGYLGLPGRVFQQKLPEWTPNVQYYSSKEYPRLSHALNYNVQGTLALPVFDPSGHSCLGVLELIMTSPKINYAPEVDKVCKALEAVNLKSSEILDHPNNQICNEGRQNALAEILEVLTVVCETHNLPLAQTWVPCRHRNVLANGGGLKKSCTSFDGSCMGRICMSATEVASYVVDAHMWGFRDACLEHHLQKGQGVSGRAFLSHSSCFCGDVTQFCKTEYPLVHYALMFGLKSCFSICLRSTFTGDDEYILEFFLPPSIVDYQEQKNLLGALMATMKKHFYTLKVASGINLEDKEGLVEIIQASRNGGFDSRFEYIQIPRPVQLPPASDAMPKAVEVAALETLEQQSLMVHDAPKDENNGAWDGESHKSVPCPQNKEVKKTSERKRGKAEKSISLEVLQQYFAGSLKDAAKSLGVCPTTMKRICRQHGISRWPSRKINKVNRSLSKLKRVIESVQGAEGAFGISSLATSPLPVTVSSSSHPLTPEGSNQQNFVASQPSDSQYKETNTPEAQTNDTQARLEDRLHRGVLSPEEPIHEQNGFLPKFGNGLNNFRTGSGSREESAGTPTSHGSCQGSPANDSALANNPISIRQHEQCARRESPEVAFHPIDKLNISAPPCSIPDTLVMVEPEEPFGGMLIEDAGSSKDLKNLCASVADAVLDEQVPEFCWSNHHDIALRQPMDSVCHTVPHISLRQEPRRMTIKATYKEDIIRFRIPLTSGIVELREEVAKRLKLEVGTFDIKYMDDDREWVLIACDADLQECVDISKSSGSNIIRLSVHDLNVNLGSSCESTGGE

SEQ ID NO: 419 - protein, 933 aa, Cucumis sativus
MMMMILSLLPMLALFLLRAGTSNSHSVPQKPTENQKFKILPVPSSSWGVLPSENPDGYCLIKEKMAQALRYIKESSDQHVLAQVWAPVKSGGKLVLSTSGQPFFLDSQSNGLHQYRMASLTFSFSLDADQDGYLGLPGRVFQQKLPEWTPNVQYYSSKEYPRLSHALNYNVQGTLALPVFDPSGHSCLGVLELIMTSPKINYAPEVDKVCKALEAVNLKSSEILDHPNNQIQSWQCLSNQICNEGRQNALAEILEVLTVVCETHNLPLAQTWVPCRHRNVLANGGGLKKSCTSFDGSCMGRICMSATEVASYVVDAHMWGFRDACLEHHLQKGQGVSGRAFLSHSSCFCGDVTQFCKTEYPLVHYALMFGLKSCFSICLRSTFTGDDEYILEFFLPPSIVDYQEQKNLLGALMATMKKHFYTLKVASGINLEDKEGLVEIIQASRNGGFDSRFEYIQIPRPVQLPPASDAMPKAVEVAALETLEQQSLMVHDAPKDENNGAWDGESHKSVPCPQNKEVKKTSERKRGKAEKSISLEVLQQYFAGSLKDAAKSLGVCPTTMKRICRQHGISRWPSRKINKVNRSLSKLKRVIESVQGAEGAFGISSLATSPLPVTVSSSSHPLTPEGSNQQNFVASQPSDSQYKETNTPEAQTNDTQARLEDRLHRGVLSPEEPIHEQNGFLPKFGNGLNNFRTGSGSREESAGTPTSHGSCQGSPANDSALANNPISIRQHEQCARRESPEVAFHPIDKLNISAPPCSIPDTLVMVEPEEPFGGMLIEDAGSSKDLKNLCASVADAVLDEQVPEFCWSNHHDIALRQPMDSVCHTVPHISLRQEPRRMTIKATYKEDIIRFRIPLTSGIVELREEVAKRLKLEVGTFDIKYMDDDREWVLIACDADLQECVDISKSSGSNIIRLSVHDLNVNLGSSCESTGGE

SEQ ID NO: 420 - protein, 964 aa, Cucurbita maxima
MTEPKPDSDHLSPFFPKSHRSGADDRNPLMDFDLDLDIPWPLDQTPLFSTSDHLASPLWAFSEADDGDDSKFAAYACSVLGTSNLNSVPQKPIENHKFKILPVPSENPDGYCLIKEKMAQALRYIKDLSDQQVLAQVWAPVKNGDKVVLSTSGQPFVLDTQSNGLHRYRLVSLTYMFSLDTELDGSLGLPGRVFQQKLPEWTPNVQYYSSKEYSRLRHALDYNVQGTLALPVFDPSGQSCLGVLELIMTSPRINYAPEVDKVCKALQAVNLKSSEILDRPNIQICNEGRQNALAEILAVLTVVCETHNLPLAQTWVPCRHRNVLANGGGLKKSCTSFDGSCMGRICMSATEVASYVVDAHKWGFREACLEHHLQKGQGVSGRAFSSHSSCFCGDITQFCKNEYPLVHYALMFGLKSCFSICLRSKFTGDDEYILEFFLPPSLVDYQEQKTLLGAMMGTMKQHFYTLKVASGINLEEGGIVEVVQASRNGGFESRLECIHIPPESDAMPNAGEVVALETLQQRSLMVHDAPKDENNTVRDRESDNPVPCVQNKEVKKTSKRKRGKAEKSISLDVLQQYFAGSLKDAAKSLGVCPTTMKRICRQHGISRWPSRKINKVNRSLSKLKRVIDSVQGNEGTFGMSSLATSPLPVAVSSSSHPLTPDGSNQNFFFASQPSDPQCKETNTSEAQTNNTQARLKDQLLRGVSNPEELFHEQNGSLMKLGNGFNNFRTGSGSRDESTGTPTSHGSCQGSPANESNPLSIHHHEQCVRRGSPEAAAFHPIDKPNKSTRACPVSDTLLMVEPKEPFGGMLIKDAGSSKDLKNLCASVADAILDDQVPKFCWPRPSDIAMRQPMESVCHTVPHISARQEPSRMTIKATYKDDIIRFQISTCTGIVELREEVAKRLKLDVGTFDIKYMDDDREWVLTACDADLQECVDISKASGSNIIRLLVHDLSVNLGSSCESTR

SEQ ID NO: 421 - protein, 903 aa, Cucurbita maxima
MMATIPNLLPMLALFLLRAGTSNLNSVPQKPIENHKFKILPVPSENPDGYCLIKEKMAQALRYIKDLSDQQVLAQVWAPVKNGDKVVLSTSGQPFVLDTQSNGLHRYRLVSLTYMFSLDTELDGSLGLPGRVFQQKLPEWTPNVQYYSSKEYSRLRHALDYNVQGTLALPVFDPSGQSCLGVLELIMTSPRINYAPEVDKVCKALQAVNLKSSEILDRPNIQICNEGRQNALAEILAVLTVVCETHNLPLAQTWVPCRHRNVLANGGGLKKSCTSFDGSCMGRICMSATEVASYVVDAHKWGFREACLEHHLQKGQGVSGRAFSSHSSCFCGDITQFCKNEYPLVHYALMFGLKSCFSICLRSKFTGDDEYILEFFLPPSLVDYQEQKTLLGAMMGTMKQHFYTLKVASGINLEEGGIVEVVQASRNGGFESRLECIHIPPESDAMPNAGEVVALETLQQRSLMVHDAPKDENNTVRDRESDNPVPCVQNKEVKKTSKRKRGKAEKSISLDVLQQYFAGSLKDAAKSLGVCPTTMKRICRQHGISRWPSRKINKVNRSLSKLKRVIDSVQGNEGTFGMSSLATSPLPVAVSSSSHPLTPDGSNQNFFFASQPSDPQCKETNTSEAQTNNTQARLKDQLLRGVSNPEELFHEQNGSLMKLGNGFNNFRTGSGSRDESTGTPTSHGSCQGSPANESNPLSIHHHEQCVRRGSPEAAAFHPIDKPNKSTRACPVSDTLLMVEPKEPFGGMLIKDAGSSKDLKNLCASVADAILDDQVPKFCWPRPSDIAMRQPMESVCHTVPHISARQEPSRMTIKATYKDDIIRFQISTCTGIVELREEVAKRLKLDVGTFDIKYMDDDREWVLTACDADLQECVDISKASGSNIIRLLVHDLSVNLGSSCESTR

SEQ ID NO: 422 - protein, 1004 aa, Cucurbita maxima
MTEPDSNHPPTLFPKSTHRSAPDDRTQLMDFDLDLDFPWPLDQIPSFASNPMSPFLVSTSDHLGSPLWAFSEPDDDDDSKFPASTCSVLGTSNSNSVPQKPSENHKFKILPVQSSSWGLIPSENPDGYCLIKEKMAQALRYIKESSDQHVLAQVWAPVKSGGKLVLSTSGQPFVLDSQSNGLHQYRMASLTFMFSLEPDQDGYLGLPGRVFQQKLPEWTPNVQYYSSKEYPRLSHALHYNVQGTLALPVFDPSGQSCLGVLELIMTSPKINYAPEVDKVCKALEAVNLKSSEILDHPNNQIHTSQCFSNQICNEGRQNALAEILEVLTVVCETHNLPLAQTWVPCRHRNVLAYGGGLKKSCTSFDGSCMGRICMSATEVASYVVDAHMWGFRDACLEHHLRKGQGVSGRAFLSHSSCFCGDITQFSKTEYPLVHYALMFGLKSCFSICLRSTFTGDDEYILEFFLPPSIVDYQEQKTLLGALMATMKQHFYTLKVASGINLKDEEGLVEIIQVSRNGGFESRIEYIQIPRPMELPPHSDAMPNAGEVVALEKLQQQSLMVHDTPKDENNSARDDENHNPAPCPQSKEVKKTSERKRGKAEKSISLEVLQQYFAGSLKDAAKSLGVCPTTMKRICRQHGISRWPSRKINKVNRSLSKLKRVIESVQGAEGAFGISSLATSPLPVTVSSSSHPLTPEVSNQQNFVASQPSDPQHKETNTSEGQTIDTWARLEDQLHRGVLSPEEPIHEQNGYLPKFGNGLSNYRTGSGSREESVGTPTSHGSCQGSPANDSGVANNPISIPLQQEQCVRRESPEVVFHPIDKLNISAPARPIPDTLVMVEPTEEAFGGMLIADAGSSKDLRNLCASVADAVLDEQVPEFCWSNPPDIALRQPMDSVCHTVPYMSAGQEARRMTIKASYKEDIIRFRIPLSSGIVELREEVAKRLKMEVGTFDIKYMDDDREWVLMACDADLQECVEISKSSGSNIIRLLVHDLSVNLGSSCESTGE

SEQ ID NO: 423 - protein, 994 aa, Cucurbita maxima
MTEPDSNHPPTLFPKSTHRSAPDDRTQLMDFDLDLDFPWPLDQIPSFASNPMSPFLVSTSDHLGSPLWAFSEPDDDDDSKFPASTCSVLGTSNSNSVPQKPSENHKFKILPVQSSSWGLIPSENPDGYCLIKEKMAQALRYIKESSDQHVLAQVWAPVKSGGKLVLSTSGQPFVLDSQSNGLHQYRMASLTFMFSLEPDQDGYLGLPGRVFQQKLPEWTPNVQYYSSKEYPRLSHALHYNVQGTLALPVFDPSGQSCLGVLELIMTSPKINYAPEVDKVCKALEAVNLKSSEILDHPNNQICNEGRQNALAEILEVLTVVCETHNLPLAQTWVPCRHRNVLAYGGGLKKSCTSFDGSCMGRICMSATEVASYVVDAHMWGFRDACLEHHLRKGQGVSGRAFLSHSSCFCGDITQFSKTEYPLVHYALMFGLKSCFSICLRSTFTGDDEYILEFFLPPSIVDYQEQKTLLGALMATMKQHFYTLKVASGINLKDEEGLVEIIQVSRNGGFESRIEYIQIPRPMELPPHSDAMPNAGEVVALEKLQQQSLMVHDTPKDENNSARDDENHNPAPCPQSKEVKKTSERKRGKAEKSISLEVLQQYFAGSLKDAAKSLGVCPTTMKRICRQHGISRWPSRKINKVNRSLSKLKRVIESVQGAEGAFGISSLATSPLPVTVSSSSHPLTPEVSNQQNFVASQPSDPQHKETNTSEGQTIDTWARLEDQLHRGVLSPEEPIHEQNGYLPKFGNGLSNYRTGSGSREESVGTPTSHGSCQGSPANDSGVANNPISIPLQQEQCVRRESPEVVFHPIDKLNISAPARPIPDTLVMVEPTEEAFGGMLIADAGSSKDLRNLCASVADAVLDEQVPEFCWSNPPDIALRQPMDSVCHTVPYMSAGQEARRMTIKASYKEDIIRFRIPLSSGIVELREEVAKRLKMEVGTFDIKYMDDDREWVLMACDADLQECVEISKSSGSNIIRLLVHDLSVNLGSSCESTGE

SEQ ID NO: 424 - protein, 870 aa, Cucurbita maxima
MAQALRYIKESSDQHVLAQVWAPVKSGGKLVLSTSGQPFVLDSQSNGLHQYRMASLTFMFSLEPDQDGYLGLPGRVFQQKLPEWTPNVQYYSSKEYPRLSHALHYNVQGTLALPVFDPSGQSCLGVLELIMTSPKINYAPEVDKVCKALEAVNLKSSEILDHPNNQIHTSQCFSNQICNEGRQNALAEILEVLTVVCETHNLPLAQTWVPCRHRNVLAYGGGLKKSCTSFDGSCMGRICMSATEVASYVVDAHMWGFRDACLEHHLRKGQGVSGRAFLSHSSCFCGDITQFSKTEYPLVHYALMFGLKSCFSICLRSTFTGDDEYILEFFLPPSIVDYQEQKTLLGALMATMKQHFYTLKVASGINLKDEEGLVEIIQVSRNGGFESRIEYIQIPRPMELPPHSDAMPNAGEVVALEKLQQQSLMVHDTPKDENNSARDDENHNPAPCPQSKEVKKTSERKRGKAEKSISLEVLQQYFAGSLKDAAKSLGVCPTTMKRICRQHGISRWPSRKINKVNRSLSKLKRVIESVQGAEGAFGISSLATSPLPVTVSSSSHPLTPEVSNQQNFVASQPSDPQHKETNTSEGQTIDTWARLEDQLHRGVLSPEEPIHEQNGYLPKFGNGLSNYRTGSGSREESVGTPTSHGSCQGSPANDSGVANNPISIPLQQEQCVRRESPEVVFHPIDKLNISAPARPIPDTLVMVEPTEEAFGGMLIADAGSSKDLRNLCASVADAVLDEQVPEFCWSNPPDIALRQPMDSVCHTVPYMSAGQEARRMTIKASYKEDIIRFRIPLSSGIVELREEVAKRLKMEVGTFDIKYMDDDREWVLMACDADLQECVEISKSSGSNIIRLLVHDLSVNLGSSCESTGE

SEQ ID NO: 425 - protein, 1004 aa, Cucurbita moschata
MTEPDSNHPSTLFPKSTHRSAPDDRTQLMDFDLDLDFPWSLDQIPSFASNPMSPFLVSTSDHLGSPLWAFSEPDDDDDSKFPASTCSVLGTSNSNSVPQKPSENHKFKILPVQSSSWGLIPSENPDGYCLIKEKMAQALRYIKESSDQHVLAQVWAPVKSGGKLVLSTSGQPFVLDSQSNGLHQYRMASLTFMFSLEPDQDGYLGLPGRVFQQKLPEWTPNVQYYSSKEYPRLSHALHYNVQGTLALPVFDPSGQSCLGVLELIMTSPKINYAPEVDKVCKALEAVNLKSSEILDHPNNQIHTSQCFSNQICNEGRQNALAEILEVLTVVCETHNLPLAQTWVPCRHRNVLAYGGGLKKSCTSFDGSCMGRICMSATEVASYVVDAHMWGFRDACLEHHLRKGQGVSGRAFLSHSSCFCGDITQFSKTEYPLVHYALMFGLKSCFSICLRSTFTGDDEYILEFFLPPSIVDYQEQKTLLGALMATMKQHFYTLKVASGINLKDEEGLVEIIQVSRNGGFESRIEYIQIPRPMELPPHSDAMPNAGEVVALEKLQQQSLMVHDTPKDENNSARDDESHNPAPCPQSKEVKKTSERKRGKAEKSISLEVLQQYFAGSLKDAAKSLGVCPTTMKRICRQHGISRWPSRKINKVNRSLSKLKRVIESVQGAEGAFGISSLATSPLPVTVSSSSHPLTPEGSNQQNFVASQPSDPQHKETNTSEGQTIDTWARLEDQLHRGVLSPEEPIHEQNGYLPRFGNGLSNYRTGSGSREESVGTPTSHGSCQGSPANDSGVANNPISIPQQQEQCVRRESPEVAFHPIDKLNISAPARPIPDTLVMVEPTEEAFGGMLIADAGSSKDLRNLCASVADAVLDEQVPEFCWSNPPDIALRQPMDSVCHTVPYMSAGQEARRMTIKASYKEDIIRFRIPLSSGIVELREEVAKRLKMEVGTFDIKYMDDDREWVLMACDADLQECVEISKSSGSNIIRLLVHDISVNLGSSCESTGE

SEQ ID NO: 426 - protein, 994 aa, Cucurbita moschata
MTEPDSNHPSTLFPKSTHRSAPDDRTQLMDFDLDLDFPWSLDQIPSFASNPMSPFLVSTSDHLGSPLWAFSEPDDDDDSKFPASTCSVLGTSNSNSVPQKPSENHKFKILPVQSSSWGLIPSENPDGYCLIKEKMAQALRYIKESSDQHVLAQVWAPVKSGGKLVLSTSGQPFVLDSQSNGLHQYRMASLTFMFSLEPDQDGYLGLPGRVFQQKLPEWTPNVQYYSSKEYPRLSHALHYNVQGTLALPVFDPSGQSCLGVLELIMTSPKINYAPEVDKVCKALEAVNLKSSEILDHPNNQICNEGRQNALAEILEVLTVVCETHNLPLAQTWVPCRHRNVLAYGGGLKKSCTSFDGSCMGRICMSATEVASYVVDAHMWGFRDACLEHHLRKGQGVSGRAFLSHSSCFCGDITQFSKTEYPLVHYALMFGLKSCFSICLRSTFTGDDEYILEFFLPPSIVDYQEQKTLLGALMATMKQHFYTLKVASGINLKDEEGLVEIIQVSRNGGFESRIEYIQIPRPMELPPHSDAMPNAGEVVALEKLQQQSLMVHDTPKDENNSARDDESHNPAPCPQSKEVKKTSERKRGKAEKSISLEVLQQYFAGSLKDAAKSLGVCPTTMKRICRQHGISRWPSRKINKVNRSLSKLKRVIESVQGAEGAFGISSLATSPLPVTVSSSSHPLTPEGSNQQNFVASQPSDPQHKETNTSEGQTIDTWARLEDQLHRGVLSPEEPIHEQNGYLPRFGNGLSNYRTGSGSREESVGTPTSHGSCQGSPANDSGVANNPISIPQQQEQCVRRESPEVAFHPIDKLNISAPARPIPDTLVMVEPTEEAFGGMLIADAGSSKDLRNLCASVADAVLDEQVPEFCWSNPPDIALRQPMDSVCHTVPYMSAGQEARRMTIKASYKEDIIRFRIPLSSGIVELREEVAKRLKMEVGTFDIKYMDDDREWVLMACDADLQECVEISKSSGSNIIRLLVHDISVNLGSSCESTGE

SEQ ID NO: 427 - protein, 870 aa, Cucurbita moschata
MAQALRYIKESSDQHVLAQVWAPVKSGGKLVLSTSGQPFVLDSQSNGLHQYRMASLTFMFSLEPDQDGYLGLPGRVFQQKLPEWTPNVQYYSSKEYPRLSHALHYNVQGTLALPVFDPSGQSCLGVLELIMTSPKINYAPEVDKVCKALEAVNLKSSEILDHPNNQIHTSQCFSNQICNEGRQNALAEILEVLTVVCETHNLPLAQTWVPCRHRNVLAYGGGLKKSCTSFDGSCMGRICMSATEVASYVVDAHMWGFRDACLEHHLRKGQGVSGRAFLSHSSCFCGDITQFSKTEYPLVHYALMFGLKSCFSICLRSTFTGDDEYILEFFLPPSIVDYQEQKTLLGALMATMKQHFYTLKVASGINLKDEEGLVEIIQVSRNGGFESRIEYIQIPRPMELPPHSDAMPNAGEVVALEKLQQQSLMVHDTPKDENNSARDDESHNPAPCPQSKEVKKTSERKRGKAEKSISLEVLQQYFAGSLKDAAKSLGVCPTTMKRICRQHGISRWPSRKINKVNRSLSKLKRVIESVQGAEGAFGISSLATSPLPVTVSSSSHPLTPEGSNQQNFVASQPSDPQHKETNTSEGQTIDTWARLEDQLHRGVLSPEEPIHEQNGYLPRFGNGLSNYRTGSGSREESVGTPTSHGSCQGSPANDSGVANNPISIPQQQEQCVRRESPEVAFHPIDKLNISAPARPIPDTLVMVEPTEEAFGGMLIADAGSSKDLRNLCASVADAVLDEQVPEFCWSNPPDIALRQPMDSVCHTVPYMSAGQEARRMTIKASYKEDIIRFRIPLSSGIVELREEVAKRLKMEVGTFDIKYMDDDREWVLMACDADLQECVEISKSSGSNIIRLLVHDISVNLGSSCESTGE

SEQ ID NO: 428 - protein, 965 aa, Cucurbita moschata
MTEPKPDSDHLSPFFPKSHRSGADDRNPIMDFDLDLDIPWPLDQTPLFSTSDHLASPLWAFSEADDGEDSKFAAYACSVLGTSNLNSVPQKPIENHKFKILPVPSENPDGYCLIKEKMAQALRYIKDLSDQQVLAQVWAPVKNGDKVVLSTSGQPFVLDTQSNGLHRYRLVSLTYMFSLDTELDGSLGLPGRVFQQKLPEWTPNVQYYSSKEYSRLRHALDYNVQGTLALPVFDPSGQSCLGVLELIMTSPRINYAPEVDKVCKALQAVNLKSSEILDRPNIQICNEGRQNALAEILAVLTVVCETHNLPLAQTWVPCRHRNVLANGGGLKKSCTSFDGSCMGRICMSATEVASYVVDAHKWGFREACLEHHLQKGQGVSGRAFSSHSSCFCGDITQFCKNEYPLVHYALMFGLKSCFSICLRSKFTGDDEYILEFFLPPSLVDYQEQKTLLGAMMATMKQHFYTLKVASGIKLEEGGIVEVVQASRNGGFESRLECIHIPPESDAMPNTGEVAALETLQQRSLMVHDAPKDENNTVRDRESDNPVPCVQNKEVKKTSKRKRGKAEKSISLDVLQQYFAGSLKDAAKSLGVCPTTMKRICRQHGISRWPSRKINKVNRSLSKLKRVIDSVQGNEGTFGMSSLATSPLPVAVSSSSHPLTPDGSNQNFFFASQPSDPQRKETNTSEAQTNNTQARLKDQLLRGVSNPEELFHEQNGSLMKLGNGFNNFRTGSGSRDESTGTPTSHGSCQGSPANESNPLSIHHQEQCVRRGSPEAAAFHPIDKPNTSTRACPVPDTLLMVEPKEPFGGMLIKDAGSSKDLKNLCASVADAVLDDQVPKFCWPRPSDIAMRQPMESVCHTVPHISARQEPSRMTIKATYKDDIIRFQISTCTGIVELQEEVAKRLKLDIGTFDIKYMDDDREWVLTACDADLQECVDISKASGSNIIRLLVHDLSVNLGSSCESTRE

SEQ ID NO: 429 - protein, 904 aa, Cucurbita moschata
MMARIPNLLPMLALFLLRAGTSNLNSVPQKPIENHKFKILPVPSENPDGYCLIKEKMAQALRYIKDLSDQQVLAQVWAPVKNGDKVVLSTSGQPFVLDTQSNGLHRYRLVSLTYMFSLDTELDGSLGLPGRVFQQKLPEWTPNVQYYSSKEYSRLRHALDYNVQGTLALPVFDPSGQSCLGVLELIMTSPRINYAPEVDKVCKALQAVNLKSSEILDRPNIQICNEGRQNALAEILAVLTVVCETHNLPLAQTWVPCRHRNVLANGGGLKKSCTSFDGSCMGRICMSATEVASYVVDAHKWGFREACLEHHLQKGQGVSGRAFSSHSSCFCGDITQFCKNEYPLVHYALMFGLKSCFSICLRSKFTGDDEYILEFFLPPSLVDYQEQKTLLGAMMATMKQHFYTLKVASGIKLEEGGIVEVVQASRNGGFESRLECIHIPPESDAMPNTGEVAALETLQQRSLMVHDAPKDENNTVRDRESDNPVPCVQNKEVKKTSKRKRGKAEKSISLDVLQQYFAGSLKDAAKSLGVCPTTMKRICRQHGISRWPSRKINKVNRSLSKLKRVIDSVQGNEGTFGMSSLATSPLPVAVSSSSHPLTPDGSNQNFFFASQPSDPQRKETNTSEAQTNNTQARLKDQLLRGVSNPEELFHEQNGSLMKLGNGFNNFRTGSGSRDESTGTPTSHGSCQGSPANESNPLSIHHQEQCVRRGSPEAAAFHPIDKPNTSTRACPVPDTLLMVEPKEPFGGMLIKDAGSSKDLKNLCASVADAVLDDQVPKFCWPRPSDIAMRQPMESVCHTVPHISARQEPSRMTIKATYKDDIIRFQISTCTGIVELQEEVAKRLKLDIGTFDIKYMDDDREWVLTACDADLQECVDISKASGSNIIRLLVHDLSVNLGSSCESTRE

SEQ ID NO: 430 - protein, 964 aa, Cucurbita pepo
  subsp. pepo
MTEPKPDSDHISSFFPKSHRSGADDRNPLMDFDLDLDIPWPLDQTPLFSTSDHLASPLWAFSEADDGDDSKFAAYACSVLGTSNLNSVPQKPIENHKFKILPVPSENPDGYCLIKEKMAQALRYIKDLSDQQVLAQVWAPVKNGDKVVLSTSGQPFVLDTQSNGLHRYRLVSLTYMFSLDTELDGSLGLPGRVFQQKLPEWTPNVQYYSSKEYSRLRHALDYNVQGTLALPVFDPSGQSCLGVLELIMTSPRINYAPEVDKVCKALQAVNLKSSEILDRPNIQICNEGRQNALAEILAVLTVVCETHNLPLAQTWVPCRHRNVLANGGGLKKSCTSFDGSCMGRICMSATEVASYVVDAHKWGFREACLEHHLQKGQGVSGRAFSSHSSCFCGDITQFCKNEYPLVHYALMFGLKSCFSICLRSKFTGDDEYILEFFLPPSLVDYQEQKTLLGAMMATMKQHFYTLKVASGIKLEEGGIVEVVQASRNGGFESRLECIHIPPESDAMPNTGEVVALETLQQRSLMVHDAPKDENNTVRDRESDNPVPCVQKEVKKTSKRKRGKAEKSISLDVLQQYFAGSLKDAAKSLGVCPTTMKRICRQHGISRWPSRKINKVNRSLSKLKRVIDSVQGNEGTFGMSSLATSPLPVAVSSSSHPLTPDGSNQNFFFASQPSDPQRKETNTSEAQTNNTQARLKDQLHRGVSNPEELFHEQNGSLMKLGNGFNNFRTGSGSRDESTGTPTSHGSCQGSPANESNPLSIHHQEQCVRRGSPEAAAFHPIDKPNTSTRACPVPDTLLTVEPKEPFGGMLIKDAGSSKDLKNLCTSVADAVLDDQVPKFCWPRPSDIAMRQPMESVCHTVPHISARQEPSRMTIKATYKDDIIRFQISTCTGIVELREEVAKRLKLDVGTFDIKYMDDDREWVLTACDADLQECVDISKASGSNIIRLLVHDLSVNLGSSCESTRE

SEQ ID NO: 431 - protein, 903 aa, Cucurbita pepo
  subsp. pepo
MMATIPNLLPMLALFLLRAGTSNLNSVPQKPIENHKFKILPVPSENPDGYCLIKEKMAQALRYIKDLSDQQVLAQVWAPVKNGDKVVLSTSGQPFVLDTQSNGLHRYRLVSLTYMFSLDTELDGSLGLPGRVFQQKLPEWTPNVQYYSSKEYSRLRHALDYNVQGTLALPVFDPSGQSCLGVLELIMTSPRINYAPEVDKVCKALQAVNLKSSEILDRPNIQICNEGRQNALAEILAVLTVVCETHNLPLAQTWVPCRHRNVLANGGGLKKSCTSFDGSCMGRICMSATEVASYVVDAHKWGFREACLEHHLQKGQGVSGRAFSSHSSCFCGDITQFCKNEYPLVHYALMFGLKSCFSICLRSKFTGDDEYILEFFLPPSLVDYQEQKTLLGAMMATMKQHFYTLKVASGIKLEEGGIVEVVQASRNGGFESRLECIHIPPESDAMPNTGEVVALETLQQRSLMVHDAPKDENNTVRDRESDNPVPCVQKEVKKTSKRKRGKAEKSISLDVLQQYFAGSLKDAAKSLGVCPTTMKRICRQHGISRWPSRKINKVNRSLSKLKRVIDSVQGNEGTFGMSSLATSPLPVAVSSSSHPLTPDGSNQNFFFASQPSDPQRKETNTSEAQTNNTQARLKDQLHRGVSNPEELFHEQNGSLMKLGNGFNNFRTGSGSRDESTGTPTSHGSCQGSPANESNPLSIHHQEQCVRRGSPEAAAFHPIDKPNTSTRACPVPDTLLTVEPKEPFGGMLIKDAGSSKDLKNLCTSVADAVLDDQVPKFCWPRPSDIAMRQPMESVCHTVPHISARQEPSRMTIKATYKDDIIRFQISTCTGIVELREEVAKRLKLDVGTFDIKYMDDDREWVLTACDADLQECVDISKASGSNIIRLLVHDLSVNLGSSCESTRE

SEQ ID NO: 432 - protein, 1004 aa, Cucurbita pepo
  subsp. pepo
MTEPDSNHPSTLFPKSTHRSVPDDRTQLMDFDLDLDFPWPLDQIPSFASNPMSPFLVSTSDHLGSPLWAFSEPDDDDDSKFPASTCSVLGTSNSNSVPQKPSENHKFKILPVQSSSWGLIPSENPDGYCLIKEKMAQALRYIKESSDQHVLAQVWAPVKSGGKLVLSTSGQPFVLDSQSNGLHQYRMASLTFMFSLEPDQDGYLGLPGRVFQQKLPEWTPNVQYYSSKEYPRLSHALHYNVQGTLALPVFDPSGHSCLGVLELIMTSPKINYAPEVDKVCKALEAVNLKSSEILDHPNNQIHTSQCFSNQICNEGRQNALAEILEVLTVVCETHNLPLAQTWVPCRHRNVLAYGGGLKKSCTSFDGSCMGRICMSATEVASYVVDAHMWGFRDACLEHHLRKGQGVSGRAFLSHSSCFCGDITQFSKTEYPLVHYALMFGLKSCFSICLRSTFTGDDEYILEFFLPPSIVDYQEQKTLLGALMATMKQHFYTLKVASGINLEDEEGLVEIIQVSRNGGFESRIEYIQIPRPMELPPHSDAMPNAGEVVALEKLQQQSLMVHDTPKDENNSARDDESHNPAPCPQSKEVKKTSERKRGKAEKSISLEVLQQYFAGSLKDAAKSLGVCPTTMKRICRQHGISRWPSRKINKVNRSLSKLKRVIESVQGAEGAFGISSLATSPLPVTVSSSSHPLTPEGSNQQNFVASQPSDPQYKETNTSEGQTIDTWARLEDQLHRGVLSPEEPIHEQNGYLPRFGNGLSNYRTGSGSREESVGTPTSHGSCQGSPANDSGVANNPISIPQQQEQCVRRESPEVAFHPIDKLNISAPARPIPDTLVMVEPTEEAFGGMLIADAGSSKDLRNLCASVADAVLDEQVPEFCWSNPPDIALRQPMESVCHTVPYMSAGQDARRMTIKASYKEDIIRFRIPLSSGIVELREEVAKRLKMEVGTFDIKYMDDDREWVLMACDADLQECVEISKSSGSNIIRLLVHDISVNLGSSCESTGE

SEQ ID NO: 433 - protein, 994 aa, Cucurbita pepo
  subsp. pepo
MTEPDSNHPSTLFPKSTHRSVPDDRTQLMDFDLDLDFPWPLDQIPSFASNPMSPFLVSTSDHLGSPLWAFSEPDDDDDSKFPASTCSVLGTSNSNSVPQKPSENHKFKILPVQSSSWGLIPSENPDGYCLIKEKMAQALRYIKESSDQHVLAQVWAPVKSGGKLVLSTSGQPFVLDSQSNGLHQYRMASLTFMFSLEPDQDGYLGLPGRVFQQKLPEWTPNVQYYSSKEYPRLSHALHYNVQGTLALPVFDPSGHSCLGVLELIMTSPKINYAPEVDKVCKALEAVNLKSSEILDHPNNQICNEGRQNALAEILEVLTVVCETHNLPLAQTWVPCRHRNVLAYGGGLKKSCTSFDGSCMGRICMSATEVASYVVDAHMWGFRDACLEHHLRKGQGVSGRAFLSHSSCFCGDITQFSKTEYPLVHYALMFGLKSCFSICLRSTFTGDDEYILEFFLPPSIVDYQEQKTLLGALMATMKQHFYTLKVASGINLEDEEGLVEIIQVSRNGGFESRIEYIQIPRPMELPPHSDAMPNAGEVVALEKLQQQSLMVHDTPKDENNSARDDESHNPAPCPQSKEVKKTSERKRGKAEKSISLEVLQQYFAGSLKDAAKSLGVCPTTMKRICRQHGISRWPSRKINKVNRSLSKLKRVIESVQGAEGAFGISSLATSPLPVTVSSSSHPLTPEGSNQQNFVASQPSDPQYKETNTSEGQTIDTWARLEDQLHRGVLSPEEPIHEQNGYLPRFGNGLSNYRTGSGSREESVGTPTSHGSCQGSPANDSGVANNPISIPQQQEQCVRRESPEVAFHPIDKLNISAPARPIPDTLVMVEPTEEAFGGMLIADAGSSKDLRNLCASVADAVLDEQVPEFCWSNPPDIALRQPMESVCHTVPYMSAGQDARRMTIKASYKEDIIRFRIPLSSGIVELREEVAKRLKMEVGTFDIKYMDDDREWVLMACDADLQECVEISKSSGSNIIRLLVHDISVNLGSSCESTGE

SEQ ID NO: 434 - protein, 951 aa, Fragaria vesca
MSDPEDDRAPSIFPKSKSLDASSLMDFDIDVPWPLDQIHFLSNPTSPLFFSPADDPCSPLWAFSDVNNNDKLARALPDPAQSVSDTNPVAQKRKENEDNRIVPSPFSGLEPNADGYFLIKERITRALRYLKESSDQHVLAQVWAPVWDGNRYVLTTSGQPFVLDPHDGLHQYRMVSLMYMFSVDGENDGVLGLPGRVFQQKLPEWTPNVQYYSIKEYPRLDHAQHYNVQGTLALPVFEPSGRSCIGVIELIMTSQKINYAPEVDKICKALEAVSLKSSEMLDHTSTQIQIRNEGRQTALTEILEILTMVCETHKLPLAQTWVPCMHRNVLAYGGGMKKSCTSFDGSCMEQVCMSTTDVAVYIVDAHMWGFREACVEHHLQKGQGVAGRAFLSRNACFCRDISQFRKTEYPLVHYARMFRLTSSFAICLQSTHTGNDDYILEFFLPPSITDSSEQQTLLGSILAIVKGHCQNLKVASGIGLAEEGIVEIVQASINEGLDSRFECIQIPRSVEPLPGSSLPNREEIVHLDPAKPQLMVDINAINDERNAVHKGGQNNISVPENKDMKKTSERKRGKTEKSISLEVLQQYFAGSLKDAAKSLGVCPTTMKRICRQHGISRWPSRKINKVNRSLSKLKLVIESVQGGEGAFGLSPLTTSPLTGAVGSNSRPFTSSQPYEVQGEKKDSPNSSSPGREGQAGIGDPDIGRGSNSSKTGSGSREASTGTPTSHGSCQGSPANGSAMAKEPFVSTMHEQFAEVDRSPESAFRPPDEVYVPVLCSIPDALLITEPEEPSRGMQLEDAGSSKDLRNLCPLADLTVDEQVPEVFWTDPPYPDSAPKQFIPTLAYTVPHNTSLREMRSVTIKAAYKDDIIRFRISMSSCIVDLREEVAKRLKLEVGTFDMKYMDDDLEWVLIACDADLQECMEICRSSGSNMIRLSVHDILPNLGSSCESTDE

SEQ ID NO: 435 - protein, 720 aa, Glycine max
MQAVKLRSSEILEHQYIQICNEDRQYALAEILEILTVVCETHSLPLAQTWVPCKHRSVLAHGGGHKKSCSSFDGCCMGQVCMSITEVAFYVIDAHTWGFHEACVEHHLQQGQGVAGRAFLSHNMCFCGNIAQFCKTEYPLVHYALMFGLTSCFAVCLQSSHTGNDDYVLEFFLPPGITDFNEQKRLLGSILATMKPHFQSLKIASGIELEENASIEIIEARNERVNLRFESIPITQSSKSPPRHASPNVGEGLPLEPSEQKIMAYFDGINDGGSLGDNAGGHIDQNTSLKIKTKKKPSERKRGKAEKSISLDVLQHYFTGSLKDAAKSLGVCPTTMKRICRQHGISRWPSRKIKKVNRSLSKLKCVIESVHGAERAFGLNSLSTVSLPIAAGSFSEPSTSNKFNRQTSLTIRPSEPKINEKDFDASGASETKRQAAMEDQFLGLEARAQSPEKVINDRGVATQEIGTKGTNKFRTGSGSSESSGNPTPHGSCHGSPPNEISPPKDIFVTGHSEKCLVLRGSLGSTTLHSTSTPNCTTAYPMPHIVETTEPQELFGGQLLERAGSSKDLRNLCPSADAVLEDQVPEAYKMNPQCSDLPQMQHMDNLNNTLTPFAVRKEVKSVTIKATYKEDIIRFKVSMDCGIVELKEEIAKRLKLEAGTFDIKYLDDDHEWVLIACDADLQECMDISRSSGSNVIRLVVHDILPILGSSCESSGDWKGCI

SEQ ID NO: 436 - protein, 990 aa, Glycine max
MSESKDENPDLPPKSKPQEEHGFAMDFDISLESLWPSDHISLVSNPMSPFLFSTISDQPCSPVWAFSDAEDERLIRIAASAGNTNTTTENLVENYDNKKTVPPLVAIPTSENPDAYCLIKERMTQALRHFKELTEQNVLAQVWAPMRNGNRYALTTSGQPFVLDPHSNGLHQYRTVSLMYMFSVDGENDEIMGLPGRVFQQKIPEWTPNVQFYSSKEYQRLNHAQHYNVRGTLALPVFELAGQSCVAVVELIMTSQKINYAPEVDKICKALEAVKLRSSEILEHQYIQICNEDRQYALAEILEILTVVCETHSLPLAQTWVPCKHRSVLAHGGGHKKSCSSFDGCCMGQVCMSITEVAFYVIDAHTWGFHEACVEHHLQQGQGVAGRAFLSHNMCFCGNIAQFCKTEYPLVHYALMFGLTSCFAVCLQSSHTGNDDYVLEFFLPPGITDFNEQKRLLGSILATMKPHFQSLKIASGIELEENASIEIIEARNERVNLRFESIPITQSSKSPPRHASPNVGEGLPLEPSEQKIMAYFDGINDGGSLGDNAGGHIDQNTSLKIKTKKKPSERKRGKAEKSISLDVLQHYFTGSLKDAAKSLGVCPTTMKRICRQHGISRWPSRKIKKVNRSLSKLKCVIESVHGAERAFGLNSLSTVSLPIAAGSFSEPSTSNKFNRQTSLTIRPSEPKINEKDFDASGASETKRQAAMEDQFLGLEARAQSPEKVINDRGVATQEIGTKGTNKFRTGSGSSESSGNPTPHGSCHGSPPNEISPPKDIFVTGHSEKCLVLRGSLGSTTLHSTSTPNCTTAYPMPHIVETTEPQELFGGQLLERAGSSKDLRNLCPSADAVLEDQVPEAYKMNPQCSDLPQMQHMDNLNNTLTPFAVRKEVKSVTIKATYKEDIIRFKVSMDCGIVELKEEIAKRLKLEAGTFDIKYLDDDHEWVLIACDADLQECMDISRSSGSNVIRLVVHDILPILGSSCESSGDWKGCI

SEQ ID NO: 437 - protein, 991 aa, Glycine max
MSEPEEENNQDYVPRSKPAEEGGGGCTTMDFDLDLETSWPLDHMAFGSNPMSPFLFSTSSDQPYSPLWAFSDGEDPKLPASAFSDCHKIFSCDSNSIAEKPVENDDNKKNLPPLVPMPPVENLDGYCVIKERMTQALRYFKELTELNVLAQVWAPVRNGNRYVLTTSGQPFVLDPHSNGLHQYRTVSLMYMFSVDGENDGSLGLPGRVFQQKLPEWTPNVQYYSSKEYPRRDHAQHYNVRGTLALPVFEPSIQSCVGVLELIMTSPKINYAPEVDKICKALETVNLRSSEILDHPYTQICNEGRQNALSEILEILTVVCETLNLPLAQTWIPCKHRSVLAQGGGVKKSCSSFDGSCMGKVCMSTTDIAFYIIDAHLWGFREACVEHHLQQGQGVAGRAFLSHSMCFCSNITQFCKTDYPLVHYALMFGLTSCFTICLRSSHTGNDDYVLEFFLPPRITDFHEQKTLLGSILAIMKQHFQSLKIASGVELEDGSIEIIEATIERVHTRHESIPITPSIKSPPRLDTSPNMGEEVPQDPSEQQILMYCNDMNDGRSLGKNADGIDHMPSIETKNIKKPLERKRGKTEKSISLEVLQRYFAGSLKDAAKSLGVCPTTMKRICRQHGISRWPSRKINKVNRSLSKLKRVIESVQGAEGAFGLNSLSKSPLPIAVGSFPEPSTPNKFSQSASLSIKPSEPQVKENELNASKALEANRQAGMEDQLLGGRTQNLEKVINDKGGYTREVGREPKRTRTRNGSSEDSTNPTSHGSCHDSPPNESSPVKDIFITSNNDQCAGIKRSPESTLQPTINTPSRPTAYPMPDFVAVELQEPFGGMLIEDAGSSKDLRNLCPLVAEVILEDMIPEACGTNLPGPDLSPKLSMGTPNKAVTPFAAMKEMKTVTIKATYREDIIRFRVSLTCGIVELKEEIAKRLKLEVGTFDIKYLDDDHEWVLIACDADLQECMDVSRSSGSNIIRVLVHDITSNLGSSCESSGE

SEQ ID NO: 438 - protein, 987 aa, Glycine max
MSESKEENPDLLLKSKAQEEHGFVMDFGIGLESLWPLDHISLVSNPMPPFLFSTISEQPFSPVWAFSDAEDERQIRIAASGNTNTTTENPIENDDNKKTVPPLVAMTASENPDGYCLIKERMTQALRHFKELTEQNVLAQVWAPVRNGNRYALTTSGQPFVLDPHSNGLHQYRTASLMYMFSVDGENDEILGLPGRVFQHKIPEWTPNVQFYSSKEYQRLNHAQHYNVRGTLALPVFELAGQSCVAVVELIMTSQKINYAPEVDKICKALEAVKLRSSEILEHPYNQICNEYRQYALAEILEILTAVCETHSLPLAQTWVPCKHRSVLAHGGGLKKICSSFNGCCMGQVCMSITEVAFYVIDAHKWGFHEACAEHHLQQGQGVAGRAFLSHNMCFCGNNTQFCKTEYPLVHYALMFHLNSCFAVCLQSSHTGNDDYVLEFFLPPGITDFNEQKRLLGSILATMKPHFQSLKIASGVELEGNASIEIIDARNERVHLRFESIPITQSSKSPPRHTSPNMGEGLPLEPSEPKIMAYFDGINDGGSLGDNAGGHIDQNTSLEIKTKKKPSDRKRGKAEISISLNVLQHYFTGSLKDAAKSLGVCPTTMKRICRQHGISRWPSRKIKKVNHSLSKLKCVIESVHGAEGAFGLNSLSTGSLPIAAGSFSDPFTSNKFHRQTTLTIRPSEPKINENDFDAFGASETKRQVAMEDQFLGLEARTRSPEKVINDKGVSIQEIGTKGTNKFRTGSGSSGSGNPTHASCHGSPPNEISPPKDTFVTGNSEQCLVLRGSLGSTTLHSTSTPNRATAYPMLHIVETTEPQEPFGGQLLEVAGSSKDLRNLCPSADAVLEDQVPEAYKMNPQCSDLPQMQHMDTLNKTMTPFAVRKEVNSVTIKATYKEDIIRFKVSMDCGIVELKEEIAKRLKLEVGTFHNKYLDDDHEWVLIACDADLQECMDISRSSGGNIIRLVVHDILPILGSSCESSRDWKGCI

SEQ ID NO: 439 - protein, 991 aa, Glycine max
MPESEEENQDYVPRSKPSEEAGGGCTMDFDLDLETSWPLDHMAFGSNPMSPFLFSTSSDQPYSPLWAFSDGEDPKLPASAFSDCHKIFSCDSNSIAEKPVENDDNKKLLPPLVPISPVENLDGYCVIKERMTQALRYFKELTELNVLAQVWAPVKNGNRYVLTTSGQPFVLDPHSNGLYQYRTVSLMYMFSVDGENDGSLGLPGRVFQQKLPEWTPNVLYYSSKEYPRRDHAQHYNVRGTLALPVFEPSIQSCVGVLELIMTSQKINYAPEVDKICKALETVNLRSSEILDHPHTQICNEGRQNALSEILEILTVVCETHNLPLAQTWIPCKHRSVLAQGGGVKKSCSSFDGRCMGKVCMSTTDIAFYIIDAHLWGFREACVEHHLQQGQGVAGRAFLSHGMCFCSNITQFYKTDYPLVHYALMFGLTSCFAICLRSSHTGNDDYVLEFFLPPRITHIHEQKTLLGSILAIMKQHFQSLHIASGVEPEDGSIEIIEATIERVHTRLESIPIASSIKSPPRPDTSPNMGEEVPQDPSEQQILMYCNDINNGGSLGENAARNIDHMPSLETKNINKPLERKRGKTEKSISLEVLQRYFAGSLKDAAKSLGVCPTTMKRICRQHGISRWPSRKINKVNRSLSKLKRVIESVQGAEGAFGLNSLSKSPLPIAVGSFPEPSTPNKFSLPASLSINPSEPQIKENELNASKALETNSQAVMEEDRLLGGRTPHLEKVINDKGRHTREVGKEPKRTRTGSGSSEDSTNPTSHGSCHDSPPNESSPVKNIFITSNNDQCAGLKRSPESTLQLTTNTPNRPAAYPMPDFVAAELQEPFGGMLIEDAGSSKDLRNLCPSVAETILEDMVPEACGTNIPGPDLSPKQSMGTPNKAVTPFVAMKEMKTVTIKATYREDIIRFRVSLTCGIVELKEEVAKRLKLEVGTFEIKYLDDDHEWVLIACDADLQECMDVSRSSGSKIIRVLVHDITSNLGSSCESSGE

SEQ ID NO: 440 - protein, 926 aa, Glycine max
MEKTPSFQLLPSLIATRSSLLLFLGDSNSIAEKPVENDDNKKLLPPLVPISPVENLDGYCVIKERMTQALRYFKELTELNVLAQVWAPVKNGNRYVLTTSGQPFVLDPHSNGLYQYRTVSLMYMFSVDGENDGSLGLPGRVFQQKLPEWTPNVLYYSSKEYPRRDHAQHYNVRGTLALPVFEPSIQSCVGVLELIMTSQKINYAPEVDKICKALETVNLRSSEILDHPHTQICNEGRQNALSEILEILTVVCETHNLPLAQTWIPCKHRSVLAQGGGVKKSCSSFDGRCMGKVCMSTTDIAFYIIDAHLWGFREACVEHHLQQGQGVAGRAFLSHGMCFCSNITQFYKTDYPLVHYALMFGLTSCFAICLRSSHTGNDDYVLEFFLPPRITHIHEQKTLLGSILAIMKQHFQSLHIASGVEPEDGSIEIIEATIERVHTRLESIPIASSIKSPPRPDTSPNMGEEVPQDPSEQQILMYCNDINNGGSLGENAARNIDHMPSLETKNINKPLERKRGKTEKSISLEVLQRYFAGSLKDAAKSLGVCPTTMKRICRQHGISRWPSRKINKVNRSLSKLKRVIESVQGAEGAFGLNSLSKSPLPIAVGSFPEPSTPNKFSLPASLSINPSEPQIKENELNASKALETNSQAVMEEDRLLGGRTPHLEKVINDKGRHTREVGKEPKRTRTGSGSSEDSTNPTSHGSCHDSPPNESSPVKNIFITSNNDQCAGLKRSPESTLQLTTNTPNRPAAYPMPDFVAAELQEPFGGMLIEDAGSSKDLRNLCPSVAETILEDMVPEACGTNIPGPDLSPKQSMGTPNKAVTPFVAMKEMKTVTIKATYREDIIRFRVSLTCGIVELKEEVAKRLKLEVGTFEIKYLDDDHEWVLIACDADLQECMDVSRSSGSKIIRVLVHDITSNLGSSCESSGE

SEQ ID NO: 441 - protein, 882 aa, Glycine max
MTASENPDGYCLIKERMTQALRHFKELTEQNVLAQVWAPVRNGNRYALTTSGQPFVLDPHSNGLHQYRTASLMYMFSVDGENDEILGLPGRVFQHKIPEWTPNVQFYSSKEYQRLNHAQHYNVRGTLALPVFELAGQSCVAVVELIMTSQKINYAPEVDKICKALEAVKLRSSEILEHPYNQICNEYRQYALAEILEILTAVCETHSLPLAQTWVPCKHRSVLAHGGGLKKICSSFNGCCMGQVCMSITEVAFYVIDAHKWGFHEACAEHHLQQGQGVAGRAFLSHNMCFCGNNTQFCKTEYPLVHYALMFHLNSCFAVCLQSSHTGNDDYVLEFFLPPGITDFNEQKRLLGSILATMKPHFQSLKIASGVELEGNASIEIIDARNERVHLRFESIPITQSSKSPPRHTSPNMGEGLPLEPSEPKIMAYFDGINDGGSLGDNAGGHIDQNTSLEIKTKKKPSDRKRGKAEISISLNVLQHYFTGSLKDAAKSLGVCPTTMKRICRQHGISRWPSRKIKKVNHSLSKLKCVIESVHGAEGAFGLNSLSTGSLPIAAGSFSDPFTSNKFHRQTTLTIRPSEPKINENDFDAFGASETKRQVAMEDQFLGLEARTRSPEKVINDKGVSIQEIGTKGTNKFRTGSGSSGSGNPTHASCHGSPPNEISPPKDTFVTGNSEQCLVLRGSLGSTTLHSTSTPNRATAYPMLHIVETTEPQEPFGGQLLEVAGSSKDLRNLCPSADAVLEDQVPEAYKMNPQCSDLPQMQHMDTLNKTMTPFAVRKEVNSVTIKATYKEDIIRFKVSMDCGIVELKEEIAKRLKLEVGTFHNKYLDDDHEWVLIACDADLQECMDISRSSGGNIIRLVVHDILPILGSSCESSRDWKGCI

SEQ ID NO: 442 - protein, 985 aa, Glycine max
MPESEEENQDYVPRSKPSEEAGGGCTMDFDLDLETSWPLDHMAFGSNPMSPFLFSTSSDQPYSPLWAFSDGEDPKLPASAFSDCHKIFSSEKPVENDDNKKLLPPLVPISPVENLDGYCVIKERMTQALRYFKELTELNVLAQVWAPVKNGNRYVLTTSGQPFVLDPHSNGLYQYRTVSLMYMFSVDGENDGSLGLPGRVFQQKLPEWTPNVLYYSSKEYPRRDHAQHYNVRGTLALPVFEPSIQSCVGVLELIMTSQKINYAPEVDKICKALETVNLRSSEILDHPHTQICNEGRQNALSEILEILTVVCETHNLPLAQTWIPCKHRSVLAQGGGVKKSCSSFDGRCMGKVCMSTTDIAFYIIDAHLWGFREACVEHHLQQGQGVAGRAFLSHGMCFCSNITQFYKTDYPLVHYALMFGLTSCFAICLRSSHTGNDDYVLEFFLPPRITHIHEQKTLLGSILAIMKQHFQSLHIASGVEPEDGSIEIIEATIERVHTRLESIPIASSIKSPPRPDTSPNMGEEVPQDPSEQQILMYCNDINNGGSLGENAARNIDHMPSLETKNINKPLERKRGKTEKSISLEVLQRYFAGSLKDAAKSLGVCPTTMKRICRQHGISRWPSRKINKVNRSLSKLKRVIESVQGAEGAFGLNSLSKSPLPIAVGSFPEPSTPNKFSLPASLSINPSEPQIKENELNASKALETNSQAVMEEDRLLGGRTPHLEKVINDKGRHTREVGKEPKRTRTGSGSSEDSTNPTSHGSCHDSPPNESSPVKNIFITSNNDQCAGLKRSPESTLQLTTNTPNRPAAYPMPDFVAAELQEPFGGMLIEDAGSSKDLRNLCPSVAETILEDMVPEACGTNIPGPDLSPKQSMGTPNKAVTPFVAMKEMKTVTIKATYREDIIRFRVSLTCGIVELKEEVAKRLKLEVGTFEIKYLDDDHEWVLIACDADLQECMDVSRSSGSKIIRVLVHDITSNLGSSCESSGE

SEQ ID NO: 443 - protein, 987 aa, Glycine soja
MSESKEENPDLLLKSKAQEEHGFVMDFGIGLEILWPLDHISLVSNPMPPFLFSTISEQPFSPVWAFSDAEDERQIRIAASGNTNTTTENPIENDDNKKTVPPLVAMTASENPDGYCLIKERMTQALRHFKELTEQNVLAQVWAPVRNGNRYALTTSGQPFVLDPHSNGLHQYRTASLMYMFSVDGENDEILGLPGRVFQHKIPEWTPNVQFYSSKEYQRLNHAQHYNVRGTLALPVFELAGQSCVAVVELIMTSQKINYAPEVDKICKALETVKLRSSEILEHPYNQICNEYRQYALAEILEILTAVCETHSLPLAQTWVPCKHRSVLAHGGGLKKICSSFNGCCMGQVCMSITEVAFYVIDAHKWGFHEACVEHHLQQGQGVAGRAFLSHNMCFCGNNTQFCKTEYPLVHYALMFHLNSCFAVCLQSSHTGNDDYVLEFFLPPGITDFNEQKRLLGSILATMKPHFQSLKIASGVELEGNASIEIIDARNERVHLRFESIPITQSSKSPPRHTSPNMGEGLPLEPSEPKIMAYFDGINDGGSLGDNAGGHIDQNTSLEIKTKKKPSDRKRGKAEISISLNVLQHYFTGSLKDAAKSLGVCPTTMKRICRQHGISRWPSRKIKKVNHSLSKLKCVIESVHGAEGAFGLNSLSTGSLPIAAGSFSDPFTSNKFHRQTTLTIRPSEPKINENDFDASGASETKRQVAMEDQFLGLEARTRSPEKVINDKGVSIQEIGTKGTNKFRTGSGSSGSGNPTHASCHGSPPNEFSPPKDTFVTGNSEQCLVLRGSLGSTTLHSTSTPNRATAYPMLHIVETTEPQEPFGGQLLEVAGSSKDLRNLCPSADAVLEDQVPEAYKMNPQCSDLPQMQHMDTLNKTMTPFAVRKEVNSVTIKATYKEDIIRFKISMDCGIVELKEEIAKRLKLEVGTFHNKYLDDDHEWVLIACDADLQECIDISRSSGGNIIRLVVHDILPILGSSCESSRDWKGCI

SEQ ID NO: 444 - protein, 991 aa, Glycine soja
MPESEEENQDYVPRSKPSEEAGGGCTMDFDLDLETSWPLDHMAFGSNPMSPFLFSTSSDQPYSPLWAFSDGEDPKLPASAFSDCHKIFSCDSNSIAEKPVENDDNKKLLPPLVPISPVENLDGYCVIKERMTQALRYFKELTELNVLAQVWAPVKNGNRYVLTTSGQPFVLDPHSNGLYQYRTVSLMYMFSVDGENDGSLGLPGRVFQQKLPEWTPNVLYYSSKEYPRRDHAQHYNVRGTLALPVFEPSIQSCVGVLELIMTSQKINYAPEVDKICKALETVNLRSSEILDHPHTQICNEGRQNALSEILEILTVVCETHNLPLAQTWIPCKHRSVLAQGGGVKKSCSSFDGRCMGKVCMSTTDIAFYIIDAHLWGFREACVEHHLQQGQGVAGRAFLSHGMCFCSNITQFYKTDYPLVHYALMFGLTSCFAICLRSSHTGNDDYVLEFFLPPRITHIHEQKTLLGSILAIMKQHFQSLHIASGVEPEDGSIEIIEATIERVHTRLESIPIASSIKSPPRPDTSPNMGEEVPQDPSEQQILMYCNDINNGGSLGENAARNIDHMPSLETKNINKPLERKRGKTEKSISLEVLQRYFAGSLKDAAKSLGVCPTTMKRICRQHGISRWPSRKINKVNRSLSKLKRVIESVQGAEGAFGLNSLSKSPLPIAVGSFPEPSTPNKFSLPASLSINPSEPQMKENELNASKALETNSQAVMEEDRLLGGRTPHLEKVINDKGRHTREVGKEPKRTRTGSGSSEDSTNPTSHGSCHDSPPNESSPVKNIFITSNNDQCAGLKRSPESTLQLTTNTPNRPAAYPMPDFVAAELQEPFGGMLIEDAGSSKDLRNLCPSVAETILEDMVPEACGTNIPGPDLSPKQSMGTPNKAVTPFVAMKEMKTVTIKATYREDIIRFRVSLTCGIVELKEEVAKRLKLEVGTFEIKYLDDDHEWVLIACDADLQECMDVSRSSGSKIIRVLVHDITSNLGSSCESSGE

SEQ ID NO: 445 - protein, 672 aa, Hordeum vulgare
  subsp. vulgare
MVMEVEADMERVLGGFSLRLSDRDDSDETGGGGGRGGGSHDEADGGGGAVKERIARALRLYKEASGGDGGALVQVWAPARDGERRRVLATRGQPFMLPSRCRRLLQYRTVSLTHVFAVGGGERERAAWEERGLPGRVFDARAPEWTPNVQFYGTGEYARMSYALIYDIQASLALPILDPADPRRCLAVLELVFTAAPAARFAAEAHNLCKALQAVSLRGSEICHPVPPTEVRAATCEPWICNSEATQAAMSEVSELLAAVREAHELPLAQAWVRCKQCNRTDVDDDGQHFSLTTAGAPFRLGSHYGGFREACTEHHLRRDQGLVGEAAIARAPRFCADVARRSKDAYPLAHYARMHGLAGCLAVPLRLPQSAMDDGRVEEEWVVLEFFLPPDCRSIAEQKAMVDAIAATVREECSGARLAMSGLQDLCLESILSDSDHAMVAGAANELNGRGDYDTNGSDEEDGDQAAGIHGTDQNGAEDCVPPQKTKKKTGRKAGRPISLNELQGYFSGSLKDAARSLGVCPTTMKRICRQHGISRWPFRKISKVNRALGKIRRAAIESVDCSRKQTTADASSSSSSSSSRRAPAPHLPCLSSALGEDTSSQDSSQDPPSSHQSHITQVSAAAQQWRGRGAGDHQGELQRGHHQVQSAVLYRRRSGEGGGGQEAGPRCACL

SEQ ID NO: 446 - protein, 1028 aa, Humulus lupulus
MSESEEVAATSFPPRSSKEVLMDFDLDLDNPWPMDQIAFVSNPMSPLLFSSSSTDHPFSPLWAFTDAENEENTTTTTTNNNNNSNNNNNNNNCSNTNSTNNINNTIKLGRLANSAVADSSRFSCNSNSVAERPAGNEENRSLPSPFSGLVPVDSPNGYYWIKERMTQALRYLKDSTDQHVLAQVWAPVKNGSRYVLTTSGQPFVLDPDSNGLHQYRMVSLMYSFSVDGETNGVLGLPGRVFRQKLPEWTPNVQYYSITEYPRLDHAQHYNVRGSLALPVFEPSGQSCVGVLELIMTSEKINYAPEVDKVCKALEAVNLRSAEILDHTDTQICNEGRQSALTEILEILTAACETHKLPMAQTWVPCMHRNVLAYGGGLKKNCTSIDGSCMGQVCMSTTEVAFYIVDARMWGFREACLEHHLQKGQGVAGRAFYSRNLCFSSDITQFCKNEYPLVHYARMFELTSCFAVCLQSSHTGNDNYVLEFFLPPNTNPSEQHTLLGSLLATIKKHFQSLKIASGIELEEEGFVEVVKVSATGGLESNFECIRIPQIAESPPGPCSLPNGGDMVQRDLLKPQLTVGHDAGNGGQDAVHDGGNMNHVSVSDNKETKKSERKRGKTEKSISLEVLQQYFAGSLKDAAKSLGVCPTTMKRICRQHGISRWPSRKINKVNRSLSKLKRVIESVQGAEGAFGLTPLATSPLPVAVTSVPRPSTSNGTIQQNSPCHVPCDLPLERKDSPTNSSSRREGHAEIEDQLQGGGISIQKDLIHENSGFYLPENNRGSNHSKTGSGSREVSGGTPTSHGSCQGSPANGSMMLKDPFAYSIHEQCIKVEGSPESALQPTDGYIFSVPDALVTTESQEPFGGMLVEDAGSSKDLRNLCHATDAILDESVPEYCWMNPPPPPPPPCSEFAPNDTTTDIIITQTQPNVKVSQEMRSVTIKATYREDIIRFRLSLSCNIVELREEVAKRLKLEVGTFDIKYMDDDQEWVLIACDADLQECMDVCRSSGSNMIRLLIHDIMPNLGSSCESTEE

SEQ ID NO: 447 - protein, 1010 aa, Jatropha curcas
MPEQEEDKSKGNQPPVVAGVGGGGVGGGVRGETLMDLDLDLESSWPLDQISFLSNPLSPLLLSSSDQPCSPLWAFSDTDDERLVASASSHATVPPLPAAAGLRLSDYPIFVTCNTASVNENPTENDDKRKLPSPLLGLMPIDNPDGYCIIKERMTQALRNFKDSTEQHVLAQVWAPVKNGGRYVLTTSGQPFVIDPHSNGLHQYRMVSLMYMFSVDGESDGELGLPGRVFRLKLPEWSPNVQYYSTKEYSRRDHALCYNVQGTLALPVFEPSGQYCVGVLELIMTSQKINYGPEVDKVCKALEAVNLKSSEILDHPGIQICNEGRKNALAEILEILTAVCETHKLALAQTWVPCMHRSVLAYGGGVKKSCTSFDGSCNGQVCMSTTDVAFYVVDPHMWGFREACLEHHLQKGQGVAGRAFSSHSACFCQDITQFCKTEYPLVHYARMFELTSCFAICLHSSHTGDDEYVLEFFLPSSISDIYEQKALLGSMLATMKQHFQSLKVASGMNLEEEEGFIEIVRTSMTGRLDLGLECIRIPQSPKTPPNTNTLSEGGHMAQIDSIRHQLVVDLAVVDNGGKFPTTHPDNKVNKRPSERKRGKTEKSISLEVLQQYFAGSLKDAAKSLGVCPTTMKRICRQHGISRWPSRKINKVNRSLSKLKRVIESVQGAEGAFDLTPLATSPLPVAVGSISWPSNLNGCNQRNSPISKSPEPNGERNGSPLCKTPESNVHAGVDGQLLGGGILSHEELVLQNRFSPELGQCSNRSKAGSGSREESTGTPTSHGSCQGSPANDSAPVKDLTGSPVHEQCNKVGCASELAFQPKRELNLSAAYTIPDALVVTKAQEPFGEMLIEDAGSSKDLRNLCPAVADAILDERVPESSWVPESGWVNHQCPDLSMAAIEHAMPHATARQEMRSITIKATYKEDIIRFRISLSSGIVELKEEVAKRLKLEVGTFDIKYLDDDQEWVLIACNADLQECIDVSRSSGCNIIRLSVHDVNALLGSSCESTGEL

SEQ ID NO: 448 - protein, 1041 aa, Juglans regia
MELEVEPYRPIRIISLSPTNQIPEIETASKMCGPEELNSCGLPPKSTGPQVVEEEEEEEEQEEEEEEAAAEEERVVEALIMDFDDLDGSWPLDQVSSVSDHNDDDKNNNQYPMSPLYLSCSDQAFSPLWAFLDGNDDASHATSAPPVCSALFPGTTIPVAERPVVNNFDDSRLPFPLMGLTPQENPDGCFVIKERMTLALRYFKDLTEQNVLAQVWVPVKNGSRYVLTTSGQPFVLDPHSNGLNQYRMVSQTYVFPVDEDNNGLLGLPGRVFCQRVPEWTPNVQYYSMLEYPRRNHAQNFNVRGSLALPVFEPSGESCVGVLELILTSAKINYAPEVDKVCKALEAVNLKSSQILDHPNTQICNEGRQNALAEILGILTVVCETHKLPLAQTWVPCMHRNILAYGGGLKKSCTSFDGSCMAQICMSTPDVALYVVDSQMWRFREACVQHHLKKGQGVAGRAFLSRSSCFCGNITLFCKTNYPLVHYARMFGLAGCFAICLRSTHTGDDDYILEFFLPPGITDFYEQQILLGSLLATMKQHFQSLKVASDIELEEEVSVEIVQVSEDGVDSRIESIRIPLSTKSTPRPDGLLDMGDMVQDSPKQQLMVHLDDINDKGTDVKNGGGSINNFSSLDIKEMKNKSQRKRGKTEKSISLEVLQQYFAGSLKDAAKSLGVCPTTMKRICRQHGISRWPSRKINKVNRSLTKLKRVIESVQGAEGTFSLNSLNPSPLPIRSNQQTSPCFKHSEPHEKNESPTRITLKSDEQDGMEDLLQGGRTFSPEKLVHDHSRSPPEVGKGSNGSKARSGSCEESAGTPTSHGSCQGGPPVESTALAKHLYVSSINDQCVKAGGDSPELAYPPTGPPNISAAYSLPDGILMTEPQETFGGMLIEDAGSSKDLRNLCPSVADAVLDEQAPEFCLPNPPCPNQSMPTLAPTTPHVTARKEMKNVTIKATYKEDIIRFRISLSSGILELKEEVAKRLKLEVGTFDIKYLDDDLEWVLIACDADLQECMDIPRSSGSNIIRLLVQDTISNLGSSCESSWD

SEQ ID NO: 449 - protein, 990 aa, Juglans regia
MGGPEEQSSGFPPKSPGPTVEVEEEEDRFEALVLDLDDLDGSWPLDQISLFSDHNHENNDNNLPMSPLCLSCSDQAFSPLWAFLDGNDYAKHPTSALPDCSGLLSGTPISIAERPMVNNDGKQRLPSPLIELVPLDNPDGYCAIKERMTQALRTFKDLTEQNVLAQVWVPVKNGSQYVLTTSGQPFVIGSHINGLHQYRMVSQMYMFPVDEETDGLPGLPGRVFQKRVPEWTPNVQFYSMLEYPRRNHAQNYNVHGTLALPVTEPSGQSCVAVLELIMTSAKINYAPEFDKVCKALETVNLKSSKILDCPSTQIRNEGRQNALAEILGILTVVCETHKLPLAQTWVPCRHRNILAHGGGLKKSCTSFDGSCMAQVCMSTTDVALYVVDAHMWRFREACVQHHLQKGQGVAGRAFLSHNSCFCGNVTLFCKTDYPLVHYARMFGLASCFAICLRSTHTGDDDYILEFFLPRGISDFYEQQILLGSLLATMKQHFQSLKVASGIELEEKVSVEIVQVSTGERVDSRLESVRIPPSTKSPPRPDGLPNMGDMVQVDSSKQQLMVHLNYINYNGAGSLNKFSPSENKEMRKTSERKRGKTEKSISLEVLQQYFAGSLKDAAKSLGVCPTTMKRICRQHGISRWPSRKINKVNRSLSKLKRVIESVQGAEGAFGLSSIHPSTLPARSNQQTSPCFKPSEPQEMNESPTLKNNHQQDDMGDQLQGERMLCPEKLVHDHSRFPPEVFKGSSRSKSRSSSCEESAGSPTSHGSCQVSPPNESTVPAKHPFVSSINEQCVNVGGSPELAYPTTSPLNMSATYSIPDVLLMTEPQETFEGMLIEDSGISKDLRNLCPSVADALLDEQVPEFCSTNPPCPNMAPNQSMAPLAHTMPHDRARKEMKSLTVKASYREDIIRFRISLGSCILELKEEVAKRLKLEVGTFEIKYLDDDHEWVLIACDADLQECMDISRLSGFNTIRLLVQDIMSNLGTSCESSGE

SEQ ID NO: 450 - protein, 875 aa, Juglans regia
MVNNDGKQRLPSPLIELVPLDNPDGYCAIKERMTQALRTFKDLTEQNVLAQVWVPVKNGSQYVLTTSGQPFVIGSHINGLHQYRMVSQMYMFPVDEETDGLPGLPGRVFQKRVPEWTPNVQFYSMLEYPRRNHAQNYNVHGTLALPVTEPSGQSCVAVLELIMTSAKINYAPEFDKVCKALETVNLKSSKILDCPSTQIRNEGRQNALAEILGILTVVCETHKLPLAQTWVPCRHRNILAHGGGLKKSCTSFDGSCMAQVCMSTTDVALYVVDAHMWRFREACVQHHLQKGQGVAGRAFLSHNSCFCGNVTLFCKTDYPLVHYARMFGLASCFAICLRSTHTGDDDYILEFFLPRGISDFYEQQILLGSLLATMKQHFQSLKVASGIELEEKVSVEIVQVSTGERVDSRLESVRIPPSTKSPPRPDGLPNMGDMVQVDSSKQQLMVHLNYINYNGAGSLNKFSPSENKEMRKTSERKRGKTEKSISLEVLQQYFAGSLKDAAKSLGVCPTTMKRICRQHGISRWPSRKINKVNRSLSKLKRVIESVQGAEGAFGLSSIHPSTLPARSNQQTSPCFKPSEPQEMNESPTLKNNHQQDDMGDQLQGERMLCPEKLVHDHSRFPPEVFKGSSRSKSRSSSCEESAGSPTSHGSCQVSPPNESTVPAKHPFVSSINEQCVNVGGSPELAYPTTSPLNMSATYSIPDVLLMTEPQETFEGMLIEDSGISKDLRNLCPSVADALLDEQVPEFCSTNPPCPNMAPNQSMAPLAHTMPHDRARKEMKSLTVKASYREDIIRFRISLGSCILELKEEVAKRLKLEVGTFEIKYLDDDHEWVLIACDADLQECMDISRLSGFNTIRLLVQDIMSNLGTSCESSGE

SEQ ID NO: 451 - protein, 976 aa, Lotus japonicus
MSESDEEKPDFPQKARPTEEPGFAMDFDLDLESSWPMDHMSFVSNPMSPFLFSTMSDQPCSPLWAFSDGEDDRHTSLAAPAFSDCHKIFPCDSNSVTEKPMENDDNNKLLPPVVPQPPIENLDRFCVIKERMTQALRHFKELTELNVLAQVWAPVRNGNRYVLTTSGQPFVLDPHSNGLHQYRTASLMYMFSADGENDGTLGLPGRVFQHKLPEWTPNVLYYSNKEYPRRDHAEHYNVRGTLALPVFEPALQSCVGVLELIMTSQKINYGPEVEKICKALEAVNLKSSEILEPPYTQICNEGRQNALSEILEILTVVCETHNLPLAQTWVPCRHRSVLAHGGGLKKICSSFDGSCMGQVCMSITDVASYIIDPHLWGFREACVEHHLQQGQGVAGRAFSSHSMCFCPNITQFCKTDYPLVHYALMFGLTSCFAICLRSSHTGDDDYVLEFFLPPRITHFSEQKTLVGSILATMKQHFQSLKIAAGVELEDGGSVEIIEATNERVTLRLESIPIAQSVQSPPGPGGSPNMVEEVPKDPSEQQTMMNCNDMNEGGAHGDNAGGNIDQMSSLETKTMKKPSERKRGKTEKSISLEVLQRYFAGSLKDAAKSLGVCPTTMKRICRQHGISRWPSRKINKVNRSLSKLKRVIESVQGAEGAFGLNSLSTSPLPVVGSFPEPSTPNKFSQQASMRPLESQMKENEIDASKILEIEDPLLGGMTQNLEKVFNDKGPRRIRTGSGSSEDSTNPTSHGSCYGSPPIESSHVKDISITSNNERCVVPRGSPESSPLQPINTLNSPSPIPIPDIVLTELQEPFGGMLIEDAGSSKDLRNLCPSAAEAILEDQVPEACPTNNPPGCSSLAPKRPVDTLGKTVTPFAAKKEMKTVTIKATYREDIIRFRVSLTCGIVELKEEVSKRLKLEVGTFDIKYLDDDQEWVLIACDADLQECIDVSRSSASHIIRVLVHDITSNLGSSCESSGE

SEQ ID NO: 452 - protein, 979 aa, Lupinus angustifolius
MTEPEEENPLDFDLEMENPWPLDNMATSPFVFSTSTSSPVWVFSDVEDDSFVKVAPSPFSDCYKISCDSNSIAEKPEENDDSNKLLPPLVAMPPLENVDWYYVVKEKMTQALRYFKQLTEQNVLAQVWAPVRNGNCYVLTTAGQPFVLDPHSNGLNQYRTVSLMYMFPVDGENDGSPGLPGRVFQKKLPEWSPDVQYYSSKEYPRRDYAQHYNVRGTLALPVFEPSLHSCVGVVELIMTSQKINYAPEVDKICKSLEIFPHSPVVSFLAGSKFEEFGNSGASIHSDITWQCLLNQICNEGRQNALAEILEILTAVCETHNLPLAQTWVPCKHRSVLANGGGLKKVCSSFDGSCMGQVCMSTTDVASYIIDPHLWGFREACVEHHLQQGQGVAGRAFLSHNMCFCSNITQFCKTDYPLVHYALMFGLTSCFAICLRSSHSEEDDYVLEFFMPPRITDFHEQKTLLGSILRTMKQHFQSLKIAAGVELEENGSIEIIEATNEGVHFTLESIPIDRSTKSPLIPDYAPNIVEEIPEDPSEQQIMMYCNDINDGEDFGDNARGSIDQMSLLKTKTIKKPSERKRGKTEKSISLEVLQRYFAGSLKDAAKSLGVCPTTMKRICRQHGISRWPSRKINKVNRTLSKLKRVIESVHSAEGAFDLNSLSTSPLPDVVGSFPEPFTPNKFSQQAILCTRPSEPQMKQNEFDTLKISERSRQDVMEDQLLGTIQSLEKVINDRGDPKRTVTKSSSSEDSTNPTSHGSCHFSPPNESPPVKDILFASNNEQGVALRELPELAFQPTNTLNFPSDYPIPNIAPAELQQQPFREMLIEDAGSSEDFRNLCPSITDAILEDLIPEACGTNLPCSDLAPRQSLHTLNNAVTPADRKEIKNVTIKATYKQYIIRFRVSLTCSIVDLREEVAKRLKLEVGTFDIKYLDDDNEWVLIACDADMQECMDVSSSGSNIVRVLVHDLISNLGSSHERGGE

SEQ ID NO: 453 - protein, 957 aa, Lupinus angustifolius
MTEPEEENPLDFDLEMENPWPLDNMATSPFVFSTSTSSPVWVFSDVEDDSFVKVAPSPFSDCYKISCDSNSIAEKPEENDDSNKLLPPLVAMPPLENVDWYYVVKEKMTQALRYFKQLTEQNVLAQVWAPVRNGNCYVLTTAGQPFVLDPHSNGLNQYRTVSLMYMFPVDGENDGSPGLPGRVFQKKLPEWSPDVQYYSSKEYPRRDYAQHYNVRGTLALPVFEPSLHSCVGVVELIMTSQKINYAPEVDKICKSLEAVNLRSSEILEHPYIQICNEGRQNALAEILEILTAVCETHNLPLAQTWVPCKHRSVLANGGGLKKVCSSFDGSCMGQVCMSTTDVASYIIDPHLWGFREACVEHHLQQGQGVAGRAFLSHNMCFCSNITQFCKTDYPLVHYALMFGLTSCFAICLRSSHSEEDDYVLEFFMPPRITDFHEQKTLLGSILRTMKQHFQSLKIAAGVELEENGSIEIIEATNEGVHFTLESIPIDRSTKSPLIPDYAPNIVEEIPEDPSEQQIMMYCNDINDGEDFGDNARGSIDQMSLLKTKTIKKPSERKRGKTEKSISLEVLQRYFAGSLKDAAKSLGVCPTTMKRICRQHGISRWPSRKINKVNRTLSKLKRVIESVHSAEGAFDLNSLSTSPLPDVVGSFPEPFTPNKFSQQAILCTRPSEPQMKQNEFDTLKISERSRQDVMEDQLLGTIQSLEKVINDRGDPKRTVTKSSSSEDSTNPTSHGSCHFSPPNESPPVKDILFASNNEQGVALRELPELAFQPTNTLNFPSDYPIPNIAPAELQQQPFREMLIEDAGSSEDFRNLCPSITDAILEDLIPEACGTNLPCSDLAPRQSLHTLNNAVTPADRKEIKNVTIKATYKQYIIRFRVSLTCSIVDLREEVAKRLKLEVGTFDIKYLDDDNEWVLIACDADMQECMDVSSSGSNIVRVLVHDLISNLGSSHERGGE

SEQ ID NO: 454 - skipped

SEQ ID NO: 455 - protein, 819 aa, Malus x domestica
MLPSTPPNLKNEREDALMDFDFDLDVLWPLDPIHFLSYPTSPLLLPPNDQPCTPLWAFSDGDVESDYKLAGHVGQALSDCSQFVSCNSNSVTEGSTETESNRMLPSPFSGLEPLESSDGYSLFNEKITQALRYLKELTDQPVLAQFWAPVKDGNRYVLTTLGQPFVLDPQCIRLHQYRMACLMYMFSVDGESDGVLGLPGRVFQHKLPEWTPNVQYYSIKEYARLRHAQQYNVQGTLALPVFEPSGRSCVGVLELIMISPLINYGPEVDKAVGLKSSEILDHPSRQVSCSNEYMLATSCIQIQICNEGRQTALAEILKILIVVSETHKLPLAQTWVPCMHRNVLAYDGGLKKSCTSFDGSSMEQVCMSTTDVAFYIVDAHMWHFRDACVEHHLHKGQGVAGRAFLSHNACFCEDITQFCKSEYPVAHYARMFGLAGSFAICLQSTHTGNDDYILEFFLPPSITDSHEQQTLLGSILAIMKNHFRSLSVASGIVLEEEGIVEIVQASKNNGLATRLQCILIPRSVESPPGPALPYREEMVQLDSSKPQLVVGYDVANDGRNYVHEGGENNISFPENKDIKKKPEKKRGKAEKSISLDVLQQYFAGSLKDAAKSLGVCPTTMKRICRHHGISRWPSRKIKKINHSLTKLQRVIESVHGAEGAFGLTPLTASGSISRPWILNGTEGRAGIDNHLLDERMLSYEELLLEHNRCLRDRGKGSNTSNRGNSSTEASACTSTCHGSFQGSPGNGIAMVNPPFSDSAPKQSNTMPHITGRQEMKSVTIKATYKEDIIRFRVSMSSGFVDMKEIKTGRGHIRHQMCGL

SEQ ID NO: 456 - protein, 999 aa, Manihot esculenta
MPEQEDDKSKENQTVGGDKGETLMDLDLDLDTSWPLDQISYLSNPLSPLLLSSSDQPCSPLWAFSDADDDRLLPVSSASHATTPPLRFSDYPIFLACAPNSVAENHTENDDKRKFPSPLLGLMPFDNPDGYCVIKERMTLALRKFKESTEQHVLAQVWAPTKNGGRYVLTTSGQPFVIDPHSNGLHQYRMVSLMYMFSVDGDCEGELGLPGRVFRQKLPEWTPNVQYYSSKEYSRRDHALHYNVQGTLALPVFEPFGQSCVGVLELIMTSQKINYGPEVNKVCKALEAVNLRSSEILDHPSTQICNEGRRNALAEILEILTVVCETHKLALAQTWVPCMHRSVLAFDGGLKKSCTSFDGSCNGQVCMSTTDVAFYVVDPHMWGFREACLEHHLQKGQGVAGRAFLSHNACFCPDITQFCKTEYPLVHYARMFGLSGSFAICLRSSYTGNDNYVLEFFWPLSISDNYEQNALLGSLVATMKQHFQSLKVASGMDLEEEEGFVEIIQTSMSGRLDLRLECIRIPQSPKSPPNLNTSPKEGKTAQLDPLKHHLMVNLDAVDNGGNISQAEGSHFPTSLPENKGNKKPSERKRGKTEKSISLEVLQQYFAGSLKDAAKSLGVCPTTMKRICRQHGISRWPSRKINKVNRSLSKLKRVIESVQGAEGAFDLTPLTSPLPVTVGSISWPSNLNGCNQQNSLNSKSLEPIDEKNGSPICNAAGNDGQGGGEAQLLGGRILSREEAVLQNGFSPKIGLVSDRFKAGNASGEESTGTPTSHGSCQGSPANDSAPANDSPVSPVHEKCKNAGNTPELAFQTKGKLNLSAAYSVPDALVATEAQAPLGEMLIKDAGSSKDLRNLCPSVADTILEERVPESSWTNYPGPDFPTTEAVAALEHAMTQGTTRQEMMTITIKAAYREDIIRFRISLSSGIVELKEEVAKRLKLEVGTFDIKYLDDDHEWVLIACDADLQECIDISRSSGSSIIRLSVHDVNTNLGSSCESNGEL

SEQ ID NO: 457 - protein, 1002 aa, Manihot esculenta
MAEQEDDKSKDNQSVAGNKGETLMDLDLDLDTSWPLDQIYFLSNPLSPLLLSSSDQPCSPLWAFSDADDERLAASSSSHATHPLRLSDYPIFLTCNPSSLAESQTENDDKRKLPSPLLGLMPFDNPDGYCIIKERMTQALRNFKESTEQHVLAQIWAPVKNGARYVLTTSGQPFVIDPHSNGLHQYRMVSLTYIFSLDGEFECEPGLPGRVFRQKLPEWTPNVQYYSSKEYSRRDHALHYNVQGTLALPVFEPSGQSCVGVIELIMTSQKINYGPEVDKVCKALKAVNLKSSEILDHPSTQICNEGRKNALAEILEILTVVCETHKLALAQTWIPCMHRSVLAFGGGLKKSCTSFDGSCNGQVCMSTTDVAFYVVDPHMWGFREASLEHHLQKGQGVTGRAFLSHNACFCPDITQFCKTEYPLVHYARMFGLTGCFAICLRSSHTGDDEYILEFFLPPGISDVFQQKALLGSLLATMKQHFQSLKVASGMDLEEEEGFVEIIQTSVSGKLDLRLECIQTPESPESLPNVNTSPKEGQMAQVDPVVNLDVVNNGGSTGDAEGGHFPTSPPENKGNKKPSERKRGKTEKTISLEVLQQYFSGSLKDAAKSLGVCPTTMKRICRQHGISRWPSRKINKVNRSLSKLKRVIESVQGAEGTFDLTPIATSPLPVAFGSISWPSNLNGCNQQNSPNSRSSEPNNERNGFPICKVAGSEEQSGSENQLPGGRVISHEELFLQNCFSPEIGQGSSRHKAGNVSREESAGTPTSHGSCQGSLANDIAPAKVASASPVQEQGNEVGTIPELSFQPKGKPNLSALYPIPDAFVATEAQAPFRERLIEDAGSSKDLRNLCPSVADTMLEERVPEYSWTNHPGPEFPTKQSMAALEHATPRVTARQEMRFVTIKATYREDIIRFRISVGSGITELKEEVAKRVKLEVGSFDIKYLDDDHEWVLIACDADLHECIDISRLSGGNIIRLSIHDVNTNLGSSCESNGELLLGCTYGKV

SEQ ID NO: 458 - protein, 1067 aa, Manihot esculenta
MESHTANYPPKPHKFTPFSLSSCLYIIIHIRSSHIRILGDKSFSGKSISSSSSSSPPTATAVFSFVDEMPEQEDDKSKENQTVGGDKGETLMDLDLDLDTSWPLDQISYLSNPLSPLLLSSSDQPCSPLWAFSDADDDRLLPVSSASHATTPPLRFSDYPIFLACAPNSVAENHTENDDKRKFPSPLLGLMPFDNPDGYCVIKERMTLALRKFKESTEQHVLAQVWAPTKNGGRYVLTTSGQPFVIDPHSNGLHQYRMVSLMYMFSVDGDCEGELGLPGRVFRQKLPEWTPNVQYYSSKEYSRRDHALHYNVQGTLALPVFEPFGQSCVGVLELIMTSQKINYGPEVNKVCKALEAVNLRSSEILDHPSTQICNEGRRNALAEILEILTVVCETHKLALAQTWVPCMHRSVLAFDGGLKKSCTSFDGSCNGQVCMSTTDVAFYVVDPHMWGFREACLEHHLQKGQGVAGRAFLSHNACFCPDITQFCKTEYPLVHYARMFGLSGSFAICLRSSYTGNDNYVLEFFWPLSISDNYEQNALLGSLVATMKQHFQSLKVASGMDLEEEEGFVEIIQTSMSGRLDLRLECIRIPQSPKSPPNLNTSPKEGKTAQLDPLKHHLMVNLDAVDNGGNISQAEGSHFPTSLPENKGNKKPSERKRGKTEKSISLEVLQQYFAGSLKDAAKSLGVCPTTMKRICRQHGISRWPSRKINKVNRSLSKLKRVIESVQGAEGAFDLTPLTSPLPVTVGSISWPSNLNGCNQQNSLNSKSLEPIDEKNGSPICNAAGNDGQGGGEAQLLGGRILSREEAVLQNGFSPKIGLVSDRFKAGNASGEESTGTPTSHGSCQGSPANDSAPANDSPVSPVHEKCKNAGNTPELAFQTKGKLNLSAAYSVPDALVATEAQAPLGEMLIKDAGSSKDLRNLCPSVADTILEERVPESSWTNYPGPDFPTTEAVAALEHAMTQGTTRQEMMTITIKAAYREDIIRFRISLSSGIVELKEEVAKRLKLEVGTFDIKYLDDDHEWVLIACDADLQECIDISRSSGSSIIRLSVHDVNTNLGSSCESNGEL

SEQ ID NO: 459 - protein, 691 aa, Medicago truncatula
MLLNQICNEGRQNALSEILEILTVVCETHNLPLAQTWVPCRHRSVLAHGGGFKKSCSSFDGSCMGQVCMSTTEAAAYIVDAHLWGFREACVEHHLQQGQGVAGRAFLSQTMSFCTNITQFCKTDYPLVHYALMFGLTSCFAICLRSFHTGNDDYVLEFFLPPGITEFHEQKTLLGSIFSTMKQHFQSLNIAAGVELEENGSIEIIEATDEGIRLRTESIPIAQSIKSPPRPDASPNMEDEEEGVPQDPSEVRGENVGGSVDPMSTLGNKNIKKPSERKRGKTEKSISLEVLQRYFAGSLKDAAKSLGVCPTTMKRICRQHGISRWPSRKINKVNRSLSKLKRVIDSVQRAEGAFDLNSLGNNQLPIVSSFPEPSTLNKSSQQGSLSNRPSEPQMKENEFDASKVSETNLQIVMENQLLGGRKHSLEKEVINGKGVTIQEIGKDRKRNRTRSGSSEDSTNPTSHGSCHGSPPIEIPTIKDLFIPSNNEQHVVLRRSPEPGMQPTNALNSPTAHRMVDNVIAELQEPFGGLLIEDAGSSKDLRNLCPSVAEAILEDMAPEACGNNFPGSSHLAPPKQCIDTINNSATPFAARKEMKTVTIKATYREDIIRFRVSLNCGIVELKEEVSKRLKLEVGTFDIKYMDDDNEWVLIACDADLQECMYLSRSSGGSNIIRVLVHDITSNLGSSCESSGE

SEQ ID NO: 460 - protein, 979 aa, Medicago truncatula
MSEPEEENQDFPPKTKTSLEEHGCSMDFDLDLETSWPLDHMSFITNPMSPFLFSNISDQPSSPLWTFTDGEDGKLAASALSDCHKIFSCDSNSITEKLVEKDDNKTLLPPLLPPIENLDGYCVIKEKMTQALRYFKEWTELNVLAQVWAPVRNGNRYVLTTSGQPFVLDPHSNGLNQYRTVSLMYMFSVDGENDGTLGLPGRVFQQKLPEWSPNVLYYSNKEYPRRDHAQHYNVRGTLALPVFEPSLQSCIGVIELIMTSLKINYAPEVEKICKALEAVNLRSSEFLDHPFTQICNEGRQNALSEILEILTVVCETHNLPLAQTWVPCRHRSVLAHGGGFKKSCSSFDGSCMGQVCMSTTEAAAYIVDAHLWGFREACVEHHLQQGQGVAGRAFLSQTMSFCTNITQFCKTDYPLVHYALMFGLTSCFAICLRSFHTGNDDYVLEFFLPPGITEFHEQKTLLGSIFSTMKQHFQSLNIAAGVELEENGSIEIIEATDEGIRLRTESIPIAQSIKSPPRPDASPNMEDEEEGVPQDPSEVRGENVGGSVDPMSTLGNKNIKKPSERKRGKTEKSISLEVLQRYFAGSLKDAAKSLGVCPTTMKRICRQHGISRWPSRKINKVNRSLSKLKRVIDSVQRAEGAFDLNSLGNNQLPIVSSFPEPSTLNKSSQQGSLSNRPSEPQMKENEFDASKVSETNLQIVMENQLLGGRKHSLEKEVINGKGVTIQEIGKDRKRNRTRSGSSEDSTNPTSHGSCHGSPPIEIPTIKDLFIPSNNEQHVVLRRSPEPGMQPTNALNSPTAHRMVDNVIAELQEPFGGLLIEDAGSSKDLRNLCPSVAEAILEDMAPEACGNNFPGSSHLAPPKQCIDTINNSATPFAARKEMKTVTIKATYREDIIRFRVSLNCGIVELKEEVSKRLKLEVGTFDIKYMDDDNEWVLIACDADLQECMYLSRSSGGSNIIRVLVHDITSNLGSSCESSGE

SEQ ID NO: 461 - protein, 979 aa, Medicago truncatula
MSEPEEENQDFPPKTKTSLEEHGCSMDFDLDLETSWPLDHMSFITNPMSPFLFSNISDQPSSPLWTFTDGEDGKLAASALSDCHKIFSCDSNSITEKLVEKDDNKTLLPPLLPPIENLDGYCVIKEKMTQALRYFKEWTELNVLAQVWAPVRNGNRYVLTTSGQPFVLDPHSNGLNQYRTVSLMYMFSVDGENDGTLGLPGRVFQQKLPEWSPNVLYYSNKEYPRRDHAQHYNVRGTLALPVFEPSLQSCIGVIELIMTSLKINYAPEVEKICKALEAVNLRSSEFLDHPFTQICNEGRQNALSEILEILTVVCETHNLPLAQTWVPCRHRSVLAHGGGFKKSCSSFDGSCMGQVCMSTTEAAAYIVDAHLWGFREACVEHHLQQGQGVAGRAFLSQTMSFCTNITQFCKTDYPLVHYALMFGLTSCFAICLRSFHTGNDDYVLEFFLPPGITEFHEQKTLLGSIFSTMKQHFQSLNIAAGVELEENGSIEIIEATDEGIRLRTESIPIAQSIKSPPRPDASPNMEDEEEGVPQDPSEVRGENVGGSVDPMSTLGNKNIKKPSERKRGKTEKSISLEVLQRYFAGSLKDAAKSLGVCPTTMKRICRQHGISRWPSRKINKVNRSLSKLKRVIESVQGAEGAFDLNSLGNNQLPIVSSFPEPSTLNKSSQQGSLSNRPSEPQMKENEFDASKVSETNLQIVMENQLLGGRKHSLEKEVINGKGVTIQEIGKDRKRNRTRSGSSEDSTNPTSHGSCHGSPPIEIPTIKDLFIPSNNEQHVVLRRSPEPGMQPTNALNSPTAHRMVDNVIAELQEPFGGLLIEDAGSSKDLRNLCPSVAEAILEDMAPEACGNNFPGSSHLAPPKQCIDTINNSATPFAARKEMKTVTIKATYREDIIRFRVSLNCGIVELKEEVSKRLKLEVGTFDIKYMDDDNEWVLIACDADLQECMYLSRSSGGSNIIRVLVHDITSNLGSSCESSGE

SEQ ID NO: 462 - protein, 857 aa, Medicago truncatula
MQKSEEENHDLPQKSKPLDENVFSMDYDIDFETSWPLDHISNSMHPFFLQNISEQPFSPIWTFSDDDHNIAASGNNKNIITENRVENDDKHKRVTPHIGLPPLQNPHGYCLIKERMTQALRNFKELTELNVLAQVWAPVRNGSRYKLTTSGQPFVLDAHSNGLHQYRTVSLMYMFSVDGENDEVLGLPGRVFQQKLPEWTPNVQYYSSKEYSRLNHALHYNVRGTLALPVFEPPGQSCVAVLELIMTSQKINYAPEVDKVCKALEAVNLRSSEILEHPYSQICNEDRQNALSEILEILTVVCETHNLPLAQTWVPCRHRSVLAHGGGLKKNCSSFDGYCMGQVCMSITEVAFYIIDSHTWGFHDACVEHHLQQGQGVAGRAFLSQNMCFCRNITQFCKTDYPLVHYALMFDLTSSFSICLQSSHTGGDDYVLEFFLPPSINKFCEQKGLLGSILATMKQNFQSLKVASGVELEEDGSVEIVEIINGTVHSRLESVPIIQSTKLSARHDDASPDMEEGVPLDQSRQKIITNFDDINDIGNLDDYAGGSIDQIHSLKTETKKKPSLRKRGKAEKSISLEVLQDYFSGSLKDAAKSLGVCPTTMKRICRQHGISRWPSRKIKKVNRSLSKLKCVIESVHGVEGAFGLDSPSTSTIPIAAGSFNEPSTSNKFEHHTSLSIMPSEPKKNENYLDASKSEPQKPLGGMLIEGADSSKDLKNLCPSTDVVLEDQVLEASRIHPPCSDFVHMQMQHMDTLNFAAQKEMKIVTIKATYRDDIIRFRVSWNCGIVELREEIAKRLKLEVGTFDIKYLDDDQEWILVACDADLQECMDILTLSGSNIIRLVVHDILSILGSSVESSGE

SEQ ID NO: 463 - protein, 742 aa, Medicago truncatula
MTQALRNFKELTELNVLAQVWAPVRNGSRYKLTTSGQPFVLDAHSNGLHQYRTVSLMYMFSVDGENDEVLGLPGRVFQQKLPEWTPNVQYYSSKEYSRLNHALHYNVRGTLALPVFEPPGQSCVAVLELIMTSQKINYAPEVDKVCKALEAVNLRSSEILEHPYSQICNEDRQNALSEILEILTVVCETHNLPLAQTWVPCRHRSVLAHGGGLKKNCSSFDGYCMGQVCMSITEVAFYIIDSHTWGFHDACVEHHLQQGQGVAGRAFLSQNMCFCRNITQFCKTDYPLVHYALMFDLTSSFSICLQSSHTGGDDYVLEFFLPPSINKFCEQKGLLGSILATMKQNFQSLKVASGVELEEDGSVEIVEIINGTVHSRLESVPIIQSTKLSARHDDASPDMEEGVPLDQSRQKIITNFDDINDIGNLDDYAGGSIDQIHSLKTETKKKPSLRKRGKAEKSISLEVLQDYFSGSLKDAAKSLGVCPTTMKRICRQHGISRWPSRKIKKVNRSLSKLKCVIESVHGVEGAFGLDSPSTSTIPIAAGSFNEPSTSNKFEHHTSLSIMPSEPKKNENYLDASKSEPQKPLGGMLIEGADSSKDLKNLCPSTDVVLEDQVLEASRIHPPCSDFVHMQMQHMDTLNFAAQKEMKIVTIKATYRDDIIRFRVSWNCGIVELREEIAKRLKLEVGTFDIKYLDDDQEWILVACDADLQECMDILTLSGSNIIRLVVHDILSILGSSVESSGE

SEQ ID NO: 464 - protein, 899 aa, Medicago truncatula
MASWLELPGDSNSITEKLVEKDDNKTLLPPLLPPIENLDGYCVIKEKMTQALRYFKEWTELNVLAQVWAPVRNGNRYVLTTSGQPFVLDPHSNGLNQYRTVSLMYMFSVDGENDGTLGLPGRVFQQKLPEWSPNVLYYSNKEYPRRDHAQHYNVRGTLALPVFEPSLQSCIGVIELIMTSLKINYAPEVEKICKALEAVNLRSSEFLDHPFTQICNEGRQNALSEILEILTVVCETHNLPLAQTWVPCRHRSVLAHGGGFKKSCSSFDGSCMGQVCMSTTEAAAYIVDAHLWGFREACVEHHLQQGQGVAGRAFLSQTMSFCTNITQFCKTDYPLVHYALMFGLTSCFAICLRSFHTGNDDYVLEFFLPPGITEFHEQKTLLGSIFSTMKQHFQSLNIAAGVELEENGSIEIIEATDEGIRLRTESIPIAQSIKSPPRPDASPNMEDEEEGVPQDPSEVRGENVGGSVDPMSTLGNKNIKKPSERKRGKTEKSISLEVLQRYFAGSLKDAAKSLGVCPTTMKRICRQHGISRWPSRKINKVNRSLSKLKRVIDSVQRAEGAFDLNSLGNNQLPIVSSFPEPSTLNKSSQQGSLSNRPSEPQMKENEFDASKVSETNLQIVMENQLLGGRKHSLEKEVINGKGVTIQEIGKDRKRNRTRSGSSEDSTNPTSHGSCHGSPPIEIPTIKDLFIPSNNEQHVVLRRSPEPGMQPTNALNSPTAHRMVDNVIAELQEPFGGLLIEDAGSSKDLRNLCPSVAEAILEDMAPEACGNNFPGSSHLAPPKQCIDTINNSATPFAARKEMKTVTIKATYREDIIRFRVSLNCGIVELKEEVSKRLKLEVGTFDIKYMDDDNEWVLIACDADLQECMYLSRSSGGSNIIRVLVHDITSNLGSSCESSGE

SEQ ID NO: 465 - protein, 987 aa, Mucuna pruriens
MSESEEEKPDYVPTSKAAEEVGCSMDFDLDLESSWPLDHMAFVSNPMSPLLFSTSSDQPYSPLWAFSDDGEDDRHPKLPLSAFSDCHKIFPCDSNSIAEKPLNDDKEKLLPPLVPPPPVENLDGYCVIIKERMTQALRHFKELTELNVWAPVKNGNRYVLTTSGQPFVLDPHSNGLHQYRTVSLMYMFAVDGENDGSLGLPGRVFQQKLPEWTPNVLYYSSKEYPRRDHAQHYNVRGTLALPVFEPALQSCVGVLELIMTSQKINYAPEVDKICKALEIHQSRAVSFLADSKFEEFGNFGASIYSGRQNALSEILEILTVVCETHNLPLAQTWIPCRHRSVLTQGGGIKKSCSSFDGSCMGKVCMSTTDIACYIIDAHLWGFREACVEHHLQQGQGVAGRAFLSHGMCFCSNITQFCKTDYPLVHYALMFGLTSCFAICLRSSHTGNDDYVLEFFLPPRVADSCEQKTLLGSILATMKQHFQSLKLASGVELEDRSIEIIEATIERVHTRLESIPIAPSIKSPPRHDTSPNMVEEVPSEQQILMYCNDINDGGSLGDNAGVNIDHMPSLETKNIKKPLERKRGKTEKSISLEVLQRYFAGSLKDAAKSLGVCPTTMKRICRQHGISRWPSRKINKVNRSLSKLKRVIESVQGAEGAFGLNSLNTSPLPTAVGSFPEPSTPNKFSQPTSLSIRPSEPQMKDNELNVSKVLETNRQAEMEDQFLGGKTQNLEKAINDRGWCTQEVGKEPKRTRTGSGSSEDSTNPTSRGSCHDSPPNESSPVKDIFITSNNDQCAVLRLSPESTLQPTTNTLNLPTAYPMLDFVAAELQEQFGGMLVEDAGSSKDLRNLCPSVAEAILEDLVPEACGRTSPPGLDLSPKQSMDTPNKAVTPFAARKEMKTVTIKATYREDIIRFRVPLMCGIGELKEEVAKRLKLEAGTFDIKYLDDDHEWVLIACDADLQECMDVSRSSGSNIIRVLVHDIMSNLKVE

SEQ ID NO: 466 - protein, 984 aa, Mucuna pruriens
MSESKEENPDLPPKSKPQEEHGFDMDFDIGLESLWPLDHISLVSNPMSPFLLSTISEQPFSPVWAFSDVEDDRQIRIAASGNTNRIITEKAVENDDNKKSVSGLAALAASENPDGYCLIKERMTQALRHFKELSEQNVLAQVWAPVRNGNRYALTTSGQPFVLDPHSNGLHQYRTVSLMYTFSVDGENDEILGLPGRVFQHKIPEWTPNVQYYSSKEYQRLNHAQHYNVRGTLALPVFEPAGHACVAVVELIMTSQKINYAPEVDKICKALEAVNLRSSEISEHPYNQICNEDRQYALAKILEILTVVCETHSLPLAQTWVPCKHRSVLAHGGGLKKICSSFDGCCMGQVCMSITEAAFYVIDAHTWGFHEACIEHHLQQGQGVAGRAFLSHNMCFCGNITQFCKTDYPLAHYALMFGLTSSFAVCLQSSHTGNDDYVLEFFLPPRITDFNEQKSLLGSILATMKSHFQSLKIAAGVELEENGSVEIIEARNERVHLRFESIPITQSSKSSLPRHASPIVGEELPLEPLEQQIMAYFDDINDGGSLGDNAGGHIDQNTYLETKTKKKPSERKRGKAEKSISLDVLQHYFTGSLKDAAKSLGVCPTTMKRICRQHGISRWPSRKIKKVNRSLSKLKCVIESVHGAEGAFGLNSLSRTSLPIAAGSFSEPSTSNKFNRQTSLTIRLSEPKMNENDFDASRASESNRHAVIEDHFLGARTQRPEEIGAIQEIGTKGTNKFRTGSGSSESSANPTPHGSCHGSPPNEISPAKDIFVTGNSEQCLVFRGSLEPTLLSTSTPNRATAYPMPNIVETTEPQEPFGGQLLEGAGSSKDLRNLCPSTDAVLEDQVPEACRMNPQCSDLAPVQQHMDTLNNTVTPFAVRKEVKSVTIKATYKEDIIRFKVSLNCGIVELKEEIAKRLKLEVGTFDIKYLDDDNEWVLIACDADMQECMDISRPSGSNVIRLVVHDILSILGSSSGSSGDWKGCT

SEQ ID NO: 467 - protein, 938 aa, Oryza sativa
MEVDPSSSLPGAGEGGGGGIGGGGGDLWPFDSLTTSLLFSSVSASPQPLPASSSSWLTPPSPLWLFDERQLLPLDMGAPAAPATAPPAEAAAVVEEVHRTRSGNSDTTSKRVDQINSKWQFHLSIDDNTDSSCLFKERLTQALRYFKESTDQHLLVQVWAPVKSGDRYVLTTSGQPFVLDQQSIGLLQYRAVSMMYMFSVDGENAGELGLPGRVYKQKVPEWTPNVQYYSSTEYPRLNHAISYNVHGTVALPVFDPSVQNCIAVVELIMTSKKINYAGEVDKVCKALEAVNLKSTEILDHPNVQICNEGRQSALVEILEILTVVCEEHKLPLAQTWVPCKYRSVLAHGGGVKKSCLSFDGSCMGEVCMSTSDVAFHVIDAHMWGFRDACVEHHLQKGQGVSGKAFIYRRPCFSKDISQFCKLEYPLVHYARMFGLAGCFAICLQSMYTGDDDYILEFFLPPNCRNEDDQNALLESILARMKKCLRTLKVVGNGDTNEVCLQISNVLIIETEDLKTNVHFENSEGCFRESPESNGSQRVHEVDNDGNKVSIMSERHLLADDNSQNNGASVGRPNGSGASDSLHKSNKPPERRRGKAEKTISLDVLQQYFSGSLKNAAKSLGVCPTTMKRICRQHGISRWPSRKINKVNRSLSKLKQVIESVQGSDAAFNLTSITGPLPIPVGPSSDSQNLEKASPNKVAELSNLAVEGDRDSSLQKPIENDNLAILMSQQGFIDANNNLQLEADKASHSRSSSGEGSINSRTSEASCHGSPANQTFVCKPIASTFAEPQLIPEAFTKEPFQEPALPLSRMLIEDSGSSKDLKNLFTSAVDQPFLARSSNLALMQNSGTVTIKASFKEDIVRFRFPCSGSVTALKDEVAKRLRMDVGMFDIKYLDDDHEWVKLACNADLEECMEISGSHVIRLLVSDVAAHLGSSCGSSG

SEQ ID NO: 468 - protein, 669 aa, Oryza sativa
MERVVGDFNLLLQRGGAAGERGSEGGGGGSPGTEEAAAVAVKQRIARALRLYKEAAGDGGGGWMVQVWAPARDGARRVLATRGQPFVLASQCHRLFQYRTVSLTRVFPVGGAAAADEQGLPARAFDATAPEWTPNVQCYGSGEYARISYALIYDIQGSLALPILDPDDASSPLAVLELVTTAPLLRVSGEVANLCNALRAVSLRGAGICNRAAECYSLAVNQIVHRDATRAAMAEVSELLITVCEAHKLPLAQTWVRCWSCGGGGEDTEKAALTTAGAPFHLAAGADARGFRDACVEHHLQRGQGLVGTAARAPGGGRLCADVARCSKDDYPLAHYAGMYGLAGCLVLRAELSAAAMADAAAATAGDEEDCVVLELFLPPDCTGVAEQKAAVDAVSATIKQCSGNLKAIVISNLDDLFLDTMADGDHQLRHEMDDLGDDQRCSDEEDLQLLENTNIGELNIHNADQIRNEDPTSQVGKNKTKRGKAEKSVTLEELQKHFSGSLKDAARSLGAGYSVDYLHQNPDVYAQINTQPLKVGSPGSMASQGGHFARSARCGNGDGVVTIKASHRGDIIRFRVPCSAGVAAVKAVVAKRLSLDAGAFDVKYLDDDHEWVLLSCDADFQECLDVVPALPSMSVTARSGSGAAAPVVVRLMVQEVADNIGSSCASSD

SEQ ID NO: 469 - protein, 1008 aa, Parasponia andersonii
MSESEEETTPSFPPKSTSSKEVVPDVREVLMDFDLDLDNPWPIMDQIAFVSNSMSPLLFSSPTDQPCSPLWAFADAENNDDNNNNNSNNSDKLGRLVSSAIADSSCFSCNSNSVAERPVGNEERKIAPSPFLGLVPVDNPNGYYLIKERMTQALRYLKDSTDQHVLTQIWAPVKNGCRYVLTTSGQPFVLDPDSNGLHQYRMASLLYMFSVDGETNEVLGLPGRVFRQKLPEWTPNVQYYSIREYPRLDYAQHYNVRGSLALPVFEPSGQSCVGVLELIMTSEKINYAPEVDKVCKALAGSKLEKCRYIRSYNHEICNEGRKNALTEILEILTAACETHKLPMAQTWVPCMHRNVLAYGGGLKKSCTSIDGSCMGQVCMSATELAFYIIDAHMWGFREACLEHHLQKGQGVAGRAFYSRNLCFCGDITQFCKTEYPLVHYARMFGLTSCFAVCLQSSHTGNDNYVLEFFLPPSIANASEQSALLGSLLATMKKHFQSLKVASGIGLEEEGIVELVKVSAIGGLESSLECIQITKSAESPPGPIALPNGGDMVQQDLLKQQLTVDLDTANVGEDAAHDGGSVNHVSVSENKETKKISERKRGKTEKSISLEVLQQYFAGSLKDAAKSLGVCPTTMKRICRQHGISRWPSRKINKVNRSLSKLKRVIESVQGAEGAFGLTPLATSPLPVAVASISRPSTSNGTNHQHSPSNIPSEPPMERKDSPTTSSPRRGQVETEDQLQGGGILSQKEFIHENGGFFSPEINRGSNHSKSGSGSREASVGTPTSHGSCQGSPANGSIIVKDQFVYSIHEQCIKVEGSPESAPQPTDELHFSVPDALVTAECQEPFGGMLIEDAGSSKDLRNLCPAVDAVLDEPVPEYCWINSACSDLAPKQTSGIITQTQPNVIVRLRQEMKSVTIKATYREDIIRFRISLSCSVVELKDEVAKRLKLELGTFDIKYMDDDQEWVLIACDADLQECMDVCRSSGSIMIRLLIHDIMPNLGSSCESTEE

SEQ ID NO: 470 - protein, 1009 aa, Parasponia rigida
MSESEEETTPSFPPKSTSSEEVVPDVREVLMDFDLDLDNPWPIMDQIAFVSNSMSPLLFSSPTDQPCSPLWAFADAENNDDNNNNNSNNSDKLGRLVSSAIADSSCFSCNSNSVAERPVGNEERKIAPSPFLGLVPVDNPNGYYLIKERMTQALRYLKDSTDQHVLTQIWAPVKNGCRYVLTTSGQPFVLDPDSNGLHQYRMASLLYMFSVDGETNEVLGLPGRVFRQKLPEWTPNVQYYSIREYPRLDYAQHYNVRGSLALPVFEPSGQSCVGVLELIMTSEKINYAPEVDKVCKALAGSKLEKCRYIRSYKHEICNEGRKNALTEILEILTAACETHKLPMAQTWVPCMHRNVLAYGGGLKKSCTSIDGSCMGQVCMSATELAFYIIDAHMWGFREACLEHHLQKGQGVAGRAFYSRNLCFCGDITQFCKTEYPLVHYARMFGLTSCFAVCLQSSHTGNDNYVLEFFLPPSIANASEQSVLLGSLLATMKKHFQSLKVASGIGLEEEGIVELVKVSAIGGLESSLECIQIPKSAESPPGPIALPNGGDMVQQDLLKQQLTVDLDTANVGEDAAHDGGSVNHVSVSENKETKKISERKRGKTEKSISLEVLQQYFAGSLKDAAKSLGVCPTTMKRICRQHGISRWPSRKINKVNRSLSKLKRVIESVQGAEGAFGLTPLATSPLPVAVASISRPSTSNGTNHQHSPSNIPSEPPMERKDSPTTSSPRREGQVETEDQLQGGGILSQKEFIHENGGFFSPEINRGSNHSKSGSGSREASVGTPTSHGSCQGSPANGSIIVKDPFVYSIHEQCIKVEGSPESAPQPTDELHFSVPDALVTAECQEPFGGMLIEDAGSSKDLRNLCPAVDAVLDEPVPEYCWINSACSDLAPKQTSGIITQTQPNVIVRLRQEMKSVTIKATYREDIIRFRISLSCSVVELKDEVSKRLKLELGTFDIKYMDDDQEWVLIACDADLQECMDVCRSSGSIIIRLLIHDIMPNLGSSCESTEE

SEQ ID NO: 471 - protein, 1008 aa, Parasponia rugosa
MSESEEETTPSFPPKSTSSKEVVPDVREVLMDFDLDLDNPWPMMDQIAFVSNSMSPLLFSSPTDQPCSPLWAFADAENNDDNNNNNSNNSDKLGRLVSSAIADSSCFSCNSNSVAERPVGNEERKIAPSPFLGLVPVDNPNGYYLIKERMTQALRYLKDSTDQHVLTQIWAPVKNGCRYVLTTSGQPFVLDPDSNGLHQYRMASLLYMFSVDGETNEVLGLPGRVFRQKLPEWTPNVQYYSIREYPRLDYAQHYNVRGSLALPVFEPSGQSCVGVLELIMTSEKINYAPEVDKVCKALAGSKLEKCRYIRSYKHEICNEGRKNALTEILEILTAACETHKLPMAQTWVPCMHRNVLAYGGGLKKSCTSIDGSCMGQVCMSATELAFYIIDAHMWGFREACLEHHLQKGQGVAGRAFYSRNLCFCGDITQFCKTEYPLVHYARMFGLTSCFAVCLQSSHTGNDNYVLEFFLPPSIANASEQSALLGSLLATMKKHFQSLKVASGIGLEEEGIVELVKVSAIGGLESSLECIQIPKSAESPPGPIALPNGGDMVQQDLLKQQLTVDLDTANVGEDAAHDGGSVNRVSVSENKETKKISERKRGKTEKSISLEVLQQYFAGSLKDAAKSLGVCPTTMKRICRQHGISRWPSRKINKVNRSLSKLKRVIESVQGAEGAFGLTPLATSPLPVAVASISRPSTSNGTNHQHSPSNIPSEPPMERKDSPTTSSPRRGQVETEDQLQGGGILSQKEFIHENGGFFSPEINRGSNHSKSGSGSREASVGTPNSHGSCQGSPANGSIIVKDPFVYSIHEQCIKVEGSPESAPQPTDELHFSVPDALVTAECQEPFGGMLIEDAGSSKDLRNLCPAVDAVLDEPVPEYCWINSACLDLAPKQTSGIITQTQPNVIVRLRQEMKSVTIKATYREDIIRFRISLSCSVVELKDEVAKRLKLELGTFDIKYMDDDQEWVLIACDADLQECMDVCRSSGSIMIRLLIHDIMPNLGSSCESTEE

SEQ ID NO: 472 - protein, 991 aa, Phaseolus vulgaris
MSESEEENTDYVTRSKPAEEAGCTMDFDLDLETSWPLDHMAFVSNPMSPFLFSSSTSDQPYSPLWAFSDGEDLKLPASAFSDCHKIFPCDSNSIAEKPEENDDNKKPLPPLAPMPPVENVGGYCVIKERMTQALRYFKELTELNVLAQVWAPVRNGNRYVLTTSGQPFVLDPHSNGLHQYRTVSLMYMFDVDGENDGSLGLPGRVFQQKLPEWTPNVLYYSSKEYPRRDHAQHYNVRGSLALPVFEPALQSCVGVLELIMTSQKINYAPEVDKICKALETVNLRSSEILDHPYTQICNEGRQNALSEILEILTVVCETHNLPLAQTWIPCKHRIVLAQGGGVKKSCSSFDGSCMGKVCMSTTDIAFYIIDAHLWGFREACLEHHLQQSQGVAGRAFLSQSMCFCSNITQFCKTDYPLVHYALMFGLTSCFAICLRSSHTGTDDYVLEFFLPPRVTDFHEQKALLASILATMKQHFQSLKVASGVELEDGSIEIIEATIERIHTRHESIPIAPSFRSPPRPDTSPNMEEEVPRDPSEQQHILMYCNGTNHGANLRDKAGGNIDHMTTLETKNSKKPLERKRGKTEKSISLEVLQRYFAGSLKDAAKSLGVCPTTMKRICRQHGISRWPSRKINKVNRSLSKLKRVIESVQGAEGAFGLNSLSTSPLPIAVGSLPEPSTPNKFSQQVSMGIRPSEPQMKVNELNASKELETNRQAGMEDQLIGGRIRNFERVSNDKGGSTQEVGREPKRTRTGSGSSEDSTNPTSHSSWHDSPPNESSPVKDIFITSNHDQCAVLRRSSPGSTLQPATDTPNHPTSYPMPEFVSAELQEPFGGMLLEDAGSSKDLRNLCPSVAEAILEDLVPEACGTNPPALDLSPKQSMGTPNKVVTPFAATKEMKTVTIKATYREDIIRFRVSLACGIVELKEEVAKRLKLEVGTFDIKYLDDDHEWVLIACDADLQECMDVSRSSGSNIIRVLVHDITSNLGSSCESSGE

SEQ ID NO: 473 - protein, 980 aa, Phaseolus vulgaris
MSESKEENPDLLPKSKQQEEHGFAMDFDIGFESLWSLDHISLVSNPMSPFLLSTISEQPFSPIWAFDVEDERQIRIATAGNTKAATENPVESYENKKTVSPPFVAVPPSENPDGYCLIKERMTQALRHFKELTEQNVLAQVWAPVRNGNRYALTTSGQPFVLDPHSNGLYQYRTASLMYMFSVDGENDEILGLPGRVFQHRIPEWTPNVQYYSSKEYQRLNHAQHYNVRGTLALPVFEPAGQSCVAVLELIMTSPKINYAPEVDKICKALEAVNLRSSEILEHPYNQICNEDRQYALAEILEILTVVCETHSLPLAQTWVPCEHRSVLAHGGGHKKSCSSFDGCCMGQVCMSITDVAFYVIEAHTWGFHEACVEHHLQQGQGVAGRAFLSHNMCFCGNITQFCKTEYPLVHYALMFGLTSSFAVCLQSSHTGNDEYVLEFFLPPRITDFNEQKRLLGSILATMKPHFQSLKIAAGVELEQNCSIEIIEARKEGVQLRFESIPITQSSKSPPRHASPNMGERLPPAPSEQQIMVDFDDINDGKNLGDTAGGHIDQNTSLEARTKKKPSERKRGKAEKSISLDVLQHYFTGSLKDAAKSLGVCPTTMKRICRQHGISRWPSRKIKKVNRSLSKLKCVIESVHGAEGAFGLNSLSTGSFPSTSNKFNRQTSLTIRPSEPKINENDFDASRASESNRQAGVEDHFLSTRTQNPEKVINEKVVAIQETGTKGTTRFRTGSGSSEESANPSPRGSCQGSPPNEMSPPKDIFVTGISEQCHVLRGSLGSTLYSTSTPNRATAYPMPNNFVEITEPQEPFGGQLLEGVGSSKDLRNLCPSADAVLEDQVHEHWRMNHQCSELTPVQHMDTLNNNNNNMTPFAVRKEVKSVTIKATYREDIIRFKISLNCAIVELKEEIDKRLKLEEGTFDIKYLDDDHEWVLIACDADLQECMDISRSSGSNMIRLVVHDILPILGSSCESSGDWKGC

SEQ ID NO: 474 - protein, 990 aa, Prunus avium
MVEPEDESQTPAIPPKSKNIVDDREAALMDFDLDLDAFWPLDPIHFPSNPTSPPLFSSTDQPCSPLWGFPDGDADNDDKLAGQVDQALSDRPQFSSCIPDPGREIPRENEDRRMLTSPSLGLDPVENPEAYCLIKEKITQALRQLKELTDQHVLAQVWAPVKNGGRYALTTSGQPFVLDPHTNGLHQYRMASLMYMFSVDGESDGMLGLPGRVFQQKLPEWTPNVQYYSIKEYPRLGHAQHYNVQGTLALPVFEPSGRSCVGVLELIMTSPKISYASEVDKVCKALEAVSLKSSEILDHTSMQIQICNEGRQTALTEILEILTVVCETHKLPLAQTWVPCMHRNVLAYGGGLKKSCTSFDGSCMEQVCMSTTDAAFYIVDAPMWHFREACVEHHLQKGQGVAGRAFLSHNACFCRDITQFCKTDYPLVHYARMFKLTSCFAICLQSTHTGNDDYILEFFLPPSITDSYEQQTLLGSLLAIIKNHFQSLKVASGIILEEEGLVEMVQASTNKELESRLECIRIPRSAETPPGPTLPNGEEMVQLDSSKPQLMVDFDPANDGSNAVNEGGENNISCPENKDIRKKSEKKRGKAEKSISLEVLQQYFAGSLKDAAKSLGVCPTTMKRICRHHGISRWPSRKIKKVNHSLSKLQRVIESVQGAEGAFGLTSLTASPRSGAVGSISRPYILNGSNQQSSPRSKPSELHGEKKDSPTPTTPGTEGQAWIENQLLDGGILQEELLLEHGRFLLDDGKGSNTSKTGSSSREASAGTPTSHGSCQGSPANGNALVNNTFVSSIHGQCIEVNGFPESAVRPPKELNLSVACSIPDAVLMTDPEEPCRGMLIEDAGSSKDLKNLCPQADAMVDEQVPEACCTNPPCSDSALKPSNTMPHIIARQEMKSVTIKATYKEDIIRFRISMSSGIVELKDEVAKRLKLEMGTFDIKYMDDDLEWVLIACDVDLQEFMEICRSLGRNMIRLSVHDIMSNFGSSCGSM

SEQ ID NO: 475 - protein, 474 aa, Prunus mume
MVEPEEESQTQAIPPESKNIVDDREAALMEFDLDLDAFSDRPQFSSCIPDLGREIPRENEDRRMLTSPFSGLEPVENPDAYCLIKEKITQALRQLKELTDQHVLAQFWAPVKNGGRYVLTTSGQPFVLDPHANGLYQYRMASLMYMFSVDGESDGMLGLPGRVFQQKLPEWTPNVQYYSIKEYPRLGHAQHYNVQGTLALPVFEPSGRTCVGVLELIMTSPKISYASEVDKVCKALEAVSLKSSEILDHRSMQIQICNEGRQTALTEILEILTVVCETHKLPLAQTWVPCMHRNVLAYGGGLKKSCTSFDGSCMEQVCMSTTDAAFYIVDAPMWHFREACVEHHLQKGQGVAGRAFLSRNACFCRDITQFCKTDYPLVHYARMFKLTSCFAICLQSTRTGNDDYILEFFLPPSITDSYEQLTLLGSLLAIIKNHFQSLKVASGIILEEEGLVEMVQASTNKGLDSRLECIRIPR

SEQ ID NO: 476 - protein, 991 aa, Prunus mume
MVELEEESQTQAIPPKSKNIVDDREAALMEFDLDLDAFWPLDPIHFPSNPTSPPLFSSTDQPCSPLWVFPDGDADNDDKLSGQVDQALSDRPQFSSCIPDPGREIPRENEDRRMLTSPFLGLEPFENPDAYCLIKEKITQALRQLKELTDQHVLAQVWAPVKNGGRYVLTTSGQPFVLDPHTNGLHQYRMASLMYMFSVDGESDGMLGLPGRVFQQKLPEWTPNVQYYSIKEYPRLGHAQHYNVQGTLALPVFEPSGQTCVGVLELIMTSPKINYASEVDKVCKALEAVSLKSSEIKDHTSMQIQICNEGRQTALTEILEILTVVCETHKLPLAQTWVPCMHRNVLAYGGGLKKSCTSFDGSCMEQVCMSTTDAAFYIVDAPMWHFRDACVEHHLQKGQGVAGRAFLSRNACFCRDITQFCKTDYPLVHYARMFKLTSCFAICLQSTRTGNDDYILEFFLPPSITDSYEQQTLLGSLLAIIKNHFQSLKVASGIILEEEGLVEMVQASTNKGLDSRLECIRIPCSAETPPGPAIPNGEEMVQLDSSRPQLMVDFDPANDGNNAVNEGGENNISCLENKDIKKKSEKKRGKAEKSISLEVLQQYFAGSLKDAAKSLGVCPTTMKRICRHHGISRWPSRKIKKVNHSLSKLQRVIESVQGAEGAFGLTSLTASPRSGAVGSISRPYILNGSNQQSSPSSKPSELHGEKKDSPTPTTPGKEGQAWIENQLLDGGILSQKELLLEHGRFLLDDGKGSNTSKTGSSSREASAGTPTSHGSCQGSPANGNALVNNPFVPSIHDQCIEVNGFPESAVRPPKEPNLSVACSIPDAVLMTDPEEPCRGMLIEDAGSSKDLKNLCPQVDAMVDEQVPEACRTNPPCSDSALKPSNTMPHIIARQEMKSVTIKATYKEDIIRFRISMSSGIVELKDEVAKRLKLEMGTFDIKYVDDDLEWVLVACDADLQECMEICRSLGIKMIRLSVHDIMSNFGSSCGSM

SEQ ID NO: 477 - protein, 480 aa, Prunus mume
MVEPEEESQTQAIPPESKNIVDDREAALMEFDLDLDAFSDRPQFSSCIPDLGREIPRENEDRRMLTSPFSGLEPVENPDAYCLIKEKITQALRQLKELTDQHVLAQFWAPVKNGGRYVLTTSGQPFVLDPHANGLYQYRMASLMYMFSVDGESDGMLGLPGRVFQQKLPEWTPNVQYYSIKEYPRLGHAQHYNVQGTLALPVFEPSGRTCVGVLELIMTSPKISYASEVDKVCKALEAVSLKSSEILDHRSMQVSCNNNIQICNEGRQTALTEILEILTVVCETHKLPLAQTWVPCMHRNVLAYGGGLKKSCTSFDGSCMEQVCMSTTDAAFYIVDAPMWHFREACVEHHLQKGQGVAGRAFLSRNACFCRDITQFCKTDYPLVHYARMFKLTSCFAICLQSTRTGNDDYILEFFLPPSITDSYEQLTLLGSLLAIIKNHFQSLKVASGIILEEEGLVEMVQASTNKGLDSRLECIRIPR

SEQ ID NO: 478 - protein, 457 aa, Prunus mume
MVEPEEESQTQAIPPESKNIVDDREAALMEFDLDLDAFSDRPQFSSCIPDLGREIPRENEDRRMLTSPFSGLEPVENPDAYCLIKEKITQALRQLKELTDQHVLAQFWAPVKNGGRMASLMYMFSVDGESDGMLGLPGRVFQQKLPEWTPNVQYYSIKEYPRLGHAQHYNVQGTLALPVFEPSGRTCVGVLELIMTSPKISYASEVDKVCKALEAVSLKSSEILDHRSMQVSCNNNIQICNEGRQTALTEILEILTVVCETHKLPLAQTWVPCMHRNVLAYGGGLKKSCTSFDGSCMEQVCMSTTDAAFYIVDAPMWHFREACVEHHLQKGQGVAGRAFLSRNACFCRDITQFCKTDYPLVHYARMFKLTSCFAICLQSTRTGNDDYILEFFLPPSITDSYEQLTLLGSLLAIIKNHFQSLKVASGIILEEEGLVEMVQASTNKGLDSRLECIRIPR

SEQ ID NO: 479 - protein, 683 aa, Prunus persica
MVEPEEESQTQAIPPKSKNIVDDREAALMEFDLDLDAFWPLDPIHFPSNPTSPPLFSSTDQPCSPLWGFPDGDADNDDKLAGQVDQALSDRPQFSSCIPDPEREIPRENEDRRILTSPFLGLEPVENPNAYCLIKEKITQALRQLKELTDQHVLAQVWAPVKNGGRYVLTTSGQPFVLDPHTNGLHQYRMASLMYMFSVDGESDGMLGLPGRVFQQKLPEWTPNVQYYSIKEYPRLGHAQHYNVQGTLALPVFEPSGRSCVGVLELIMTSPKINYASEVDKVCKALEAVSLKSSEILDHTSMQVSSNNICPTTMKRICRHHGISRWPSRKIKKVNHSLSKLQRVIESVQGAEGAFGLTSLTASPRSGAVGSISRPYILNGSNQQSSPSSKPSELLGEKKDSPTPTTPGKEGQAWIDNQLLDGGILSQEELLLEHGRFLLDDGKGSNTSKTGSSSREASAGTPTSHGSCQGSPANGNALVNNPFVPSIHDQCIKVNGFPESAVRPPKEPNLLVACSIPDAVLMTDPEEPCRGMLIEDAGSSKDLKNLCPQVDAMVDEQVPEAACTNPPCSDSALNPSNTMPQIIARQEMKSVTIKATYKEDIIRFRISMSSGIVELKDEVAKRLKLEMGTFDIKYMDDDLEWVLVACDADLQECMEICRSLGRKMIRLSVHDIMPNFGSSCGSM

SEQ ID NO: 480 - protein, 991 aa, Prunus persica
MVEPEEESQTQAIPPKSKNIVDDREAALMEFDLDLDAFWPLDPIHFPSNPTSPPLFSSTDQPCSPLWGFPDGDADNDDKLAGQVDQALSDRPQFSSCIPDPEREIPRENEDRRILTSPFLGLEPVENPNAYCLIKEKITQALRQLKELTDQHVLAQVWAPVKNGGRYVLTTSGQPFVLDPHTNGLHQYRMASLMYMFSVDGESDGMLGLPGRVFQQKLPEWTPNVQYYSIKEYPRLGHAQHYNVQGTLALPVFEPSGRSCVGVLELIMTSPKINYASEVDKVCKALEAVSLKSSEILDHTSMQIQICNEGRQTALTEILEILTVVCETHKLPLAQTWVPCMHRNVLAYGGGLKKSCTSFDGSCMARVCMSTTDAAFYIVDAPMWHFRDACVEHHLQKGQGVAGRAFLSRNACFCRDITQFCKTDYPLVHYARMFKLTSCFAICLQSTHTGNDDYILEFFLPPSITDSYEQQTLLGSLLAIIKNHFQSLKVASGIILEEEGLVEMVQASTNKGLDSRLECIRISRSSETPPGPALPNGEEMVQLDSSKPQLMVDFDPANDGSNAVNEGGENNISCPENKDIKKKSEKKRGKAEKSISLEVLQQYFAGSLKDAAKSLGVCPTTMKRICRHHGISRWPSRKIKKVNHSLSKLQRVIESVQGAEGAFGLTSLTASPRSGAVGSISRPYILNGSNQQSSPSSKPSELLGEKKDSPTPTTPGKEGQAWIDNQLLDGGILSQEELLLEHGRFLLDDGKGSNTSKTGSSSREASAGTPTSHGSCQGSPANGNALVNNPFVPSIHDQCIKVNGFPESAVRPPKEPNLLVACSIPDAVLMTDPEEPCRGMLIEDAGSSKDLKNLCPQVDAMVDEQVPEAACTNPPCSDSALNPSNTMPQIIARQEMKSVTIKATYKEDIIRFRISMSSGIVELKDEVAKRLKLEMGTFDIKYMDDDLEWVLVACDADLQECMEICRSLGRKMIRLSVHDIMPNFGSSCGSM

SEQ ID NO: 481 - protein, 895 aa, Prunus yedoensis
  var. nudiflora
MVEPEDEGQTPAIPPKSKNIVDDREAALMDFDLDLDAFWPLDPIHFPSNPTSPALFSSTDQPCSPLWGFPDGDADNDDKLAGQVDQALSDRPQFSSSQVWAPVKNGGRYVLTTSGQPFVLDPHTNGLHQYRMASLMYMFSVDGESDGMLGLPGRVFQQKLPEWTPNVQYYSIKEYPRLGHAQHYNVQGTLALPVFEPSGRSCVGVLELIMTSPKINYASEVDKVCKALEAVSLKSSEILDHTSMQIQICNEGRQTALTEILEILTVVCETHKLPLAQTWVPCMHRNVLAYGGGLKKSCTSFDGSCMEQVCMSTTDAAFYIVDAPMWHFREACVEHHLQKGQGVAGRAFLSRNACFCRDITQFCKTDYPLVHYARMFKLTSCFAICLQSTHTGNDDYILEFFLPPSITDSYEQHTLLGSILAIIKNHFQSLKVASGIILEDEGLVDMLDSSKPQLMVDFDPANDGSNAVNEGGENNISCPKNKDIKKKSEKKRGKAEKSISLAVLQQYFAGSLKDAAKSLGVCPTTMKRICRHHGISRWPSRKIKKVNHSLSKLQRVIESVQGAEGAFGLTSLTASPRSGAVGSISQPYILNGSNQQSSPSSKPSELHGEKKDSPTPTTAGKEGQAWIENQLLDGGILSQEELLLEHSRFLLDDGKGSNTSKTGSSSREASAGTPTSHGSCQGSPANGNALVNNTFVSSIRGQCIEVNGFPESAVRPPKEPNLSVACSIPDAVLMTDPEEPCRGMLIEDAGSSKDLKNLCPQVDAMMDEQVPEACCTNPPCSDSALKPSNTMPHIIARQEMKSVTIKASYKEDIIRFRISMSSGIVELKDEVAKRLKLEMGTFDIKYMDDDLEWVLIACDADLQECMEICRSLGRNMIRLSVHDIMSNFGSSCGSM

SEQ ID NO: 482 - protein, 988 aa, Pyrus x bretschneideri
MSDPEDKTQAPAIPPKPKNEREAALMDFDLDLDALWPLDPNHFLSNPTSPLLLPSNDQPCTPLWAFPDGDVDGDDKLTGRVGQDLSDPSQFVSCNSNSATQGSTENKDNRLLPSLFSGLEPVESSDGYSLFKEKITQALRYLKELTDQHVLAQVWVPVKDGNRYVLTTSGQPFVLDQHNIGLHQYRMASLMYMFSVGGESDGMLGLPGRVFQHKLPEWTPNVQYYSIKEYPRLGHAQHYNVQGTLALPVFEPSGRSCAGVLELIMTSPIINCGPEVDKVCKALEAVSLKSSEILDHPSRQIQICNEGRQTALAEILKILTVVCETYKLPLAQTWVPCMHRSVLAYGGGLKKSCTSFDGSCMEQVSMSTTDVAFYIIDAHMWRFRDACVEHHLQKGQGVAGRAFSSRNACFCGDITQFCKTEYPLVHYARMFGLASSFAICLQSTHTGNDDYILEFFLPPSITDSHEQQTLLGSILAIMKNDFRSLSVASGIVLEEEGIVEIVQVSTNNGLATRLECILIPHSVESPPGPALPNREEMVQLDSSKQQLKEVYDVVNDGRNPVHEGGENNISLPENKDIKKRPEKKRGKAEKSISLQVLQQYFAGSLKDAAKSLGVCPTTMKRICRHHGISRWPSRKIKKVNRSLTKLQRVIDSVQGAEGAFGLTPLTASPRPVAAGSISQPCNLNGSNKQGSPSSKPCEVSGEKKDSTTSTSPGTEGQAGIDNHLLDGWILSHEELAPEHNTFLRDRGKGSNTSNTGSSSREASAGTPTSHGSCQGSPGNGIAVVNDPFVPFIHEQCIEVNGSPQSAVRTTEESNLLVACSIPDALLMAEPEEPCRGMLLGDAGSSKDLRNLCPLADTIMDEQVREACNTNPPFLDSAPKQSNTMPDIMGRQEMKSVIIKATYKEDIIRFRVSMSSGIVELKEAVAKRLKLEVGTFDIKYVDDDLERVLVACDADLQECMEVCRTSGSNMIRLSVHDIMSHLGSSCWNA

SEQ ID NO: 483 - protein, 993 aa, Quercus suber
MAEPEEEKNSAFSATQKSTDHQNREPFMDFEDLDIGSWPLDQISFFNDINDNTNDQLQPMSPFLISNSYHNYSSLWALADENEDLAQPSSAPLELSCTPYLETEKPMEKDDIMMFPSPLVGQLPLDNPDGYFVSKERMMQALRHFKDMTEQNVLAQIWAPVKDGSRYVLTTSGQPFLIGTLGNGLHQFRAASVRYKFAVSEDGALGLPGRVFRQKFPEWTPNVQYYSCKEYPRRVHAQCFNVQGSLALPVFEPSGQSCVGVVELIMNSSKINYAPEVDKVCKALEAVNLRSSEILDHPNTQIYNEGRQNALAEILEILAVVCEAHKLPLAQTWVPCENHSVLAHGGALKKSCASLNGSCMGQVCMSTTDVAVYVVDPHMCGFREACIEHHLQKGQGVAGRAFLSHNSCFCENITQFCKTEYPLVHYARMFGLTSCFAICLRSTHTGDDDYILEFFLPPSTTDLYEQQILLGSLLEMMKQHFQSLKIASGIELEGEVSVEIIQVSTDGIVDSRLESVRITQSMKSPPGPDSLHIVEDMVQLDSSKQQLRVHLNDMNNKGIVASNAGGRLDQFSSLENEDMKKISERRRRKSEKSISLEVLQQYFSGSLKEAAKSLGVCPTTMKRICRQHGISRWPSRKINKVNRSLSKLQRVIDSVQCAEGTFGLGSLTTSQIPVSVGSHPSSLNRSNKQTSPSFKVSEPQEKNGSSTFKMLDEQAAIGDQLLRGRMLSPQKVIHDQSRSPPEHGKSSNSSKTRSRSCEESAGTPNSQDSCQGSPPNESTLVGHPYVSAINEQCVNVEGSPESPYQLTAAPNISPTNSIPDAFLMTEPQELFGGILIEDSGSSKDLRNLCPSVADAMVDEQVPEFCSTNPPCPSLASNQPIPSLVHKISHVTARNEMKSVIIKATYGDDIIRFRISLNSGMLELKEEAAKRLKLEVGTFEIKYLDDDHEWILIACDADLQECMDISRSAGSNMIRLLVQDVMPNLGSSWESSGD

SEQ ID NO: 484 - protein, 898 aa, Quercus suber
MGTPYLETEKPMEKDDIMMFPSPLVGQLPLDNPDGYFVSKERMMQALRHFKDMTEQNVLAQIWAPVKDGSRYVLTTSGQPFLIGTLGNGLHQFRAASVRYKFAVSEDGALGLPGRVFRQKFPEWTPNVQYYSCKEYPRRVHAQCFNVQGSLALPVFEPSGQSCVGVVELIMNSSKINYAPEVDKVCKALEAVNLRSSEILDHPNTQIYNEGRQNALAEILEILAVVCEAHKLPLAQTWVPCENHSVLAHGGALKKSCASLNGSCMGQVCMSTTDVAVYVVDPHMCGFREACIEHHLQKGQGVAGRAFLSHNSCFCENITQFCKTEYPLVHYARMFGLTSCFAICLRSTHTGDDDYILEFFLPPSTTDLYEQQILLGSLLEMMKQHFQSLKIASGIELEGEVSVEIIQVSTDGIVDSRLESVRITQSMKSPPGPDSLHIVEDMVQLDSSKQQLRVHLNDMNNKGIVASNAGGRLDQFSSLENEDMKKISERRRRKSEKSISLEVLQQYFSGSLKEAAKSLGVCPTTMKRICRQHGISRWPSRKINKVNRSLSKLQRVIDSVQCAEGTFGLGSLTTSQIPVSVGSHPSSLNRSNKQTSPSFKVSEPQEKNGSSTFKMLDEQAAIGDQLLRGRMLSPQKVIHDQSRSPPEHGKSSNSSKTRSRSCEESAGTPNSQDSCQGSPPNESTLVGHPYVSAINEQCVNVEGSPESPYQLTAAPNISPTNSIPDAFLMTEPQELFGGILIEDSGSSKDLRNLCPSVADAMVDEQVPEFCSTNPPCPSLASNQPIPSLVHKISHVTARNEMKSVIIKATYGDDIIRFRISLNSGMLELKEEAAKRLKLEVGTFEIKYLDDDHEWILIACDADLQECMDISRSAGSNMIRLLVQDVMPNLGSSWESSGD

SEQ ID NO: 485 - protein, 1008 aa, Solanum lycopersicum
MSEPGGGMTQNHLPKSKELTPATVTERESMMMDLDFDIDASWSFDQIFAAAAAVSSNPASPFLPCSPLWAFPDDNDEKPAGNGLSGALRISGHPRFVAYTGDLEATTETISVNTDKGRLTSPISGLLPGDNPEGSCIIKERMTQALRYLKETSGERVLAQVWAPVKEAGRSVLTTSGQPFVLDPECNGLHQYRTVSLMYMFAADGETDGVLGLPGRVFRLKLPEWTPNVQYYSSKEFPRLDHALNYNVRGTLALPVFEPSGRSCVGVLELIMTSQKINYAAEVDKVCKALEAVNLKSSDILDHPNTQVYVMGYMNQICNEGRQNALVDILEILTAVCETYKLPLAQTWVPCRHRSVLADGGGLRKSCSSFDGSCMGQICMSTTDVAFYVVDAHMWGFRDACAEHHLQRGQGVAGRAYASRKSCYCEDITQFCKTEYPLVHYARMFGLTSCFAICLRSSHTANDDYILEFFLPPNSGDYSDQPALLNSLLLTMKQHFRSLSIASGEELEHDWGSVEIIQASMEEKIDAKPESVPTAKTSPQLTSLPNGWVHLDPVGEQQSAVGSNVSKGARSTSGTGEAPNNVSNSDNKTSGKKSERKRGKAEKTISLEVLQQYFAGSLKDAAKSLGVCPTTMKRICRQHGISRWPSRKINKVNRSLSKLKCVIESVQGAEGAFTLTSLAPNSLPAAVSSISWPAGANVSNLPSSPSSKPSVFPEEKNEFFHHGTPESHIEAEPSNQMLGGRVARKEEFTPMQNGFLHAEGTHKSRTGSVSREESAGTPTSHGSCQGSPCAGNGFSPQNELVNSPAHESCMKVGGSLEAARQTTAEINLSSAFLMPQPIIPKHTQEPFGGMLVEDAGSSHDLRNLCSPRDALVDERVPDYNLTNPPFSDAIAKDPVYVPPDTIQQYSAWPEVTSVTIKATYKEDIIRFRLCLSSGIVKLKEEVAKRLKLELGTFYIKYLDDDLEFVPISCDADLQECVDISRSSGSSIVRLLIHDIMSNLGSSCESSGK

SEQ ID NO: 486 - protein, 978 aa, Solanum lycopersicum
MSEPEEEMNFIFRSKPKDFVHPPPATAAAIFAAAASASNPMSPFLVSAASEQPCSPLWAFSDENEDKPNGNALSTGSLRLSNYPRFVTYANEHEAAPETVSVTDDKKRIPPPIKGLAPLDYLDSSCIIKERMTQALRYFKESTGERVLAQVWAPVKNGGRYVLTTSGQPFVLDPDCNGLHQYRMVSLMYMFSVDGETDGVLGLPGRVYRKKLPEWTPNVQYYSSKEFPRLNHALDYNVRGTLALPVFEPSGQSCVGVLELIMTSQKINYAPEVDKVCKALEAVNLKSSEILDYPNHQICNEGRQNALVEILEILTAVCETYKLPLAQTWVPCRHRSVLADGGGFKKSCSSFDGSCMGQVCMSTTDVAFYVVDAHMWGFREACAEHHLQKGQGVAGRAYASQKSCFCEDIGKFCKTEYPLVHYARLFGLSRCFAICLRSTHTGNDDYILEFFLPPNDGDYTDQLALLNSLLLTMKQHFRSLRVASGEELEHDWGSVEIIKASTEEKLGSRFDSVPTTKSLPQSASVANGRRHPDLMEEQHSTVAKGAEGVNVTAEAHNHASVPQNKQTGKKSERKRGKAEKTISLEVLQQYFAGSLKDAAKSLGVCPTTMKRICRQHGISRWPSRKINKVNRSLSKLKRVIESVQGADGTFSLTSLAPNSLPVAVGSISWPAGINGSPCKASEYQEEKNEFSNHGTPGSHEEAEPTDQMLGSRIIGNEELSPKLNGFVREGSHRSRTGSFSREESTGTPTSHGSCQGSPSPANESSPQNELLNSPTQESVMKVEGSLEPARQTTGELNLSTAFLMPGLFIPEHTHQQFRGMLVEDAGSSHDLRNLCPAGETMFDERVPEYSWTNPPCSNGIATNQVPLPVEKMPQFSSRPEVTSVTIKATYREDIIRFRLCLNSGIYKLKEEVSKRLKLEMGTFDIKYLDDDHEWVLIACDADLQECIDISSSSGSNVVRLLVHDIMPNLGSSCESSGV

SEQ ID NO: 487 - protein, 1053 aa, Solanum tuberosum
MESHSSINHYRHLLRHLSLLATYIIERKSPSLSLYIFSSMSEPEEEMNFIFRSKPKEFAPPPPAPATALQQQQHAAGENHRESLMMDLDLDLDASWSFDQIFAAAASASNPMSPFLVPAASEQPCSPLWAFSDENEDKPNGNALSSGSLRLSNYPRFVTYANEHEAAPETVSVTDDKKRIPLPIKGLAPLDYLDSSCIIKERMTQALRYFKESTGERVLAQIWAPVKNGGRYVLTTSGQPFVLDPDCNGLHQYRMVSLMYMFSVDGETDGVLGLPGRVYRKKLPEWTPNVQYYSSKEFPRLNHALDYNVRGTLALPVFEPSGQSCVGVLELIMTSQKINYAPEVDKVCKALEAVNLKSSEILDYPNHQICNEGRQNALVEILEILTAVCETYKLPLAQTWVPCRHRSVLADGGGFKKSCSSFDGSCMGQVCMSTTDVAFYVVDAHMWGFREACAEHHLQKGQGVAGRAYASQKSCFCEDIGQFCKTEYPLVHYARLFGLSSCLAICLRSTHTGNDDYILEFFLPPNDGDYTDQLALLNSLLLTMKQHFRSLRVASGEELEHNWGSVEIIKASTEEKLGSRFDSVPTTKSLPQSASVANGRTHPDLMEEQQSPVALNVAKGAEGVNGTAEAHNHASVPENKQTGKKSERKRGKAEKTISLEVLQQYFAGSLKDAAKSLGVCPTTMKRICRQHGISRWPSRKINKVNRSLSKLKRVIESVQGADGTFSLTSLAPNSLPVAVGSISWPAGINGSPCKASEYQEEKNEFSNHGTPGSHEEAEPMDQMLGSRIIGNEELSPKQNGFVREGSHRSRTGSFSREESTGTPTSHGSCQGSPSPANESSPQNELVNSPTQESVMKVEGSLEPARQTTGEINLSTSFLMPGLYIPEHTQQQFRGMLVEDAGSSHDLRNLCPAGEAMFDERVPEYSWTNPPCSNGIATNQVPLPVEKMPQFSSRPEVTSVTIKATYREDIIRFRLCLNSGIYKLKEEVAKRLKLEMGTFDIKYLDDDHEWVLITCDADLQECIDISRSSGSNVVRLLVHDIMPNLGSSCESSGE

SEQ ID NO: 488 - protein, 1015 aa, Solanum tuberosum
MSEPEGGMTQNHLPKSKELTPLPHTASTAPVTERESMMMDLDFDIDASWSFDQIFAAAAAVSSNPASPFLPCSPLWAFSDDNDEKPAGNGLSGALRISGHPRFVAYTGDIEGTTETVSVNADKGRLPSPISGLIPGDNPDGSCIIKERMTQALRYLKESTGERVLAQVWAPVKEAGRSVLTTSGQPFVLDPECNGLHQYRTVSLMYMFAADGETDGVLGLPGRVFRLKLPEWTPNVQYYSSKEFPRLDHALHYNVRGTLALPVFEPSGRSCVGVLELIMTSQKINYAAEVDKVCKALEAVNLKSSDILDHPNTQVYVMGYMNQICNEGRQNALVDILEILTAVCETYKLPLAQTWVPCRHRSVLADGGGLKKSCSSFDGSCMGQICMSTTDVAFYVVDAHMWGFRDACAEHHLQRGQGVAGRAYASRKSCYCEDITKFCKTEYPLVHYARMFGLTSCFAICLRSSHTANDDYILEFFLPPNSGDYSDQQALLNSLLLTMKQHFRSLSIASGGELEHDWSSVEIIQASMEEKIDAKPESVPTPITSPQLTSLPNGWMHLDPVGEQQSAVGSNVSKGARSTSGTGEAPNHVSNSDNKTSGKKSERKRGKAEKTISLEVLQQYFAGSLKDAAKSLGVCPTTMKRICRQHGISRWPSRKINKVNRSLSKLKCVIESVQGAEGAFTLTSLAPNSLPAAVSSISWPAGANVSNLPSSPSSKPSVFPGEKNEFSHHGTPESHIEAEPSNQMLGGRVARKEEFTPTQNGFLHAEGTRKSRTGSVSREVSAGTPTSHGSCQGSPCAGNEFSPQNELVNSPAHESCMKVGGSLEAARQTTTEINLSSAFLMPQPIIPKHTQEPFGGMLVEDAGSSHDLRNLCLPRDALVDERVPDYNFTIPPVSDATAKDPVYVPPDAIQQYSAWPEVTSVTIKATYKEDIIRFRLCLNSGTVKLKEEVAKRLKLELGTIDIKYLDDDLELVPISCDADLQECVDISRSSGSSIVRLLIHDIMSNLGSSCESSGK

SEQ ID NO: 489 - protein, 996 aa, Solanum tuberosum
MSEPEGGMTQNHLPKSKELTPLPHTASTAPVTERESMMMDLDFDIDASWSFDQIFAAAAAVSSNPASPFLPCSPLWAFSDDNDEKPAGNGLSGALRISGHPRFVAYTGDIEGTTETVSVNADKGRLPSPISGLIPGDNPDGSCIIKERMTQALRYLKESTGERVLAQVWAPVKEAGRSVLTTSGQPFVLDPECNGLHQYRTVSLMYMFAADGETDGVLGLPGRVFRLKLPEWTPNVQYYSSKEFPRLDHALHYNVRGTLALPVFEPSGRSCVGVLELIMTSQKINYAAEVDKVCKALEAVNLKSSDILDHPNTQVYVMGYMNQICNEGRQNALVDILEILTAVCETYKLPLAQTWVPCRHRSVLADGGGLKKSCSSFDGSCMGQICMSTTDVAFYVVDAHMWGFRDACAEHHLQRGQGVAGRAYASRKSCYCEDITKFCKTEYPLVHYARMFGLTSCFAICLRSSHTANDDYILEFFLPPNSGDYSDQQALLNSLLLTMKQHFRSLSIASGGELEHDWSSVEIIQASMEEKIDAKPESVPTPITSPQLTSLPNGWMHLDPVGEQQSAVGSNVSKGARSTSGTERKRGKAEKTISLEVLQQYFAGSLKDAAKSLGVCPTTMKRICRQHGISRWPSRKINKVNRSLSKLKCVIESVQGAEGAFTLTSLAPNSLPAAVSSISWPAGANVSNLPSSPSSKPSVFPGEKNEFSHHGTPESHIEAEPSNQMLGGRVARKEEFTPTQNGFLHAEGTRKSRTGSVSREVSAGTPTSHGSCQGSPCAGNEFSPQNELVNSPAHESCMKVGGSLEAARQTTTEINLSSAFLMPQPIIPKHTQEPFGGMLVEDAGSSHDLRNLCLPRDALVDERVPDYNFTIPPVSDATAKDPVYVPPDAIQQYSAWPEVTSVTIKATYKEDIIRFRLCLNSGTVKLKEEVAKRLKLELGTIDIKYLDDDLELVPISCDADLQECVDISRSSGSSIVRLLIHDIMSNLGSSCESSGK

SEQ ID NO: 490 - protein, 937 aa, Solanum tuberosum
MITMKNLPEMDFPVLYVSPATLDLSLVYTGDIEGTTETVSVNADKGRLPSPISGLIPGDNPDGSCIIKERMTQALRYLKESTGERVLAQVWAPVKEAGRSVLTTSGQPFVLDPECNGLHQYRTVSLMYMFAADGETDGVLGLPGRVFRLKLPEWTPNVQYYSSKEFPRLDHALHYNVRGTLALPVFEPSGRSCVGVLELIMTSQKINYAAEVDKVCKALEAVNLKSSDILDHPNTQVYVMGYMNQICNEGRQNALVDILEILTAVCETYKLPLAQTWVPCRHRSVLADGGGLKKSCSSFDGSCMGQICMSTTDVAFYVVDAHMWGFRDACAEHHLQRGQGVAGRAYASRKSCYCEDITKFCKTEYPLVHYARMFGLTSCFAICLRSSHTANDDYILEFFLPPNSGDYSDQQALLNSLLLTMKQHFRSLSIASGGELEHDWSSVEIIQASMEEKIDAKPESVPTPITSPQLTSLPNGWMHLDPVGEQQSAVGSNVSKGARSTSGTGEAPNHVSNSDNKTSGKKSERKRGKAEKTISLEVLQQYFAGSLKDAAKSLGVCPTTMKRICRQHGISRWPSRKINKVNRSLSKLKCVIESVQGAEGAFTLTSLAPNSLPAAVSSISWPAGANVSNLPSSPSSKPSVFPGEKNEFSHHGTPESHIEAEPSNQMLGGRVARKEEFTPTQNGFLHAEGTRKSRTGSVSREVSAGTPTSHGSCQGSPCAGNEFSPQNELVNSPAHESCMKVGGSLEAARQTTTEINLSSAFLMPQPIIPKHTQEPFGGMLVEDAGSSHDLRNLCLPRDALVDERVPDYNFTIPPVSDATAKDPVYVPPDAIQQYSAWPEVTSVTIKATYKEDIIRFRLCLNSGTVKLKEEVAKRLKLELGTIDIKYLDDDLELVPISCDADLQECVDISRSSGSSIVRLLIHDIMSNLGSSCESSGK

SEQ ID NO: 491 - protein, 933 aa, Sorghum bicolor
MDLDPSPASAHGDGGGCADAWPFDSLTTSMLFSSVSASPQLQPLPANSSWLTPPSPLWLFEDRHMLPLDAPDAAPEAAVAAAVVEEVQRARSGNSDTSSKRVEQINHKWQFHLSLDEDGTDNSSLFKEKLTQALRYFKESTDQHLLVQVWAPVKNGDRYVLTTSGQPFVLDHQSIGLLQYRAVSMMYMFSVDGENVGELGLPGRVYKQKVPEWTPNVQYYSSGEYQRLNHAISYNVHGTVALPVFDPAAQSCIAVVELIMTSKKINYACEVDKVCKALEAVNLKSTEILDHPNVQICNEGRQAALVEILEILTVVCEEHKLPLAQTWVPCKYRSVLAHGGGLKKSCLSFDGSCMGEVCMSTSDVAFHVIDAHMWGFRDACVEHHLQRGQGVSGKAFISHKPCFSKDIQKFCKLTYPLVHYARMFGLAGCFAICLQSSYTGNDDYVLEFFLPPDCIDEDDQNALLESILTLMKRCLRSLKVVGDRYSSGASLQLSNVLKLENEEFKTDAQFDNSDGSLHESPGGDRHGGAHKFDNGNKKVLDLTEGQLLTDDYSQDNGTSAGRPNGSGASDSSLLHKTNKPPERRRGKAEKTISLEVLQQYFSGSLKNAAKSLGVCPTTMKRICRQHGISRWPSRKINKVNRSLSKLKQVIESVQGSDAAFNLTSITGPLPIPVGPSSESLNVERLTQSKVAELSNLAVDGDRDSLQKSLENDDHFGIVMAHQGFIDNNNDSQLEADKASHSRSSSGEGSINSRTSEGSCQGSPANQTFVCKPIASTFAEPQLNQEFNKEPFQEPQLPLSRMLIEDSGSSKDLKNLFTSTSDQPFLAPPNNLVSVKHSGTVTIKASFKEDIVRFRFPCSGGVIVLKEEVAKRLRMDVGTFDIKYLDDDHEWVKLACNADLEECMEISRLSGSHVIRLLVSDIAAHFGSSCGSSG

SEQ ID NO: 492 - protein, 747 aa, Sorghum bicolor
MAMEMETDMDGVLQRFDVDLLLDGHGSSDSPCGSASGGGGTQPQDNKEVVGGGAVKERIARALRIYKDAAAGHDGGGGALVQVWAPARDGDRRVLATRGQPFVLPPPRCHRLFQYRTVSLTHAFPIGGGAVPGERGLPGRVFDAGEPEWTPNVQYYGTGEYARISYALIYDIQAALALPILDPATGSCLAVLELVTTSPRLHFAAEVDRLSKALQAVALRGSEICRHPAPEVCNDDEAAAQVAMSEVAEILSKVGEAHKLPLAQVWGRCRRCSTGTEHASLSLTAAGTPFYLTDTNPTLLGFHEACVEHHLRSGRGGLVDEAAAARRPRFCADVTKYSMDAYPLAHHARFCGLAGCLAVCAQLRRGGDASMDMNGGGDGGWDECVLEFFLPPDCRDGAAQKAAADAVAATIMERFGNGDLKAVVISGLQDLAFDIVADGECVLRPDTVTMADAPELELNYHGGDERDSDEEGLCLAAAMGTTAEIEALKMHHDEHHGGEDPRSQVGKKTTTKRKGEKTVSLEELQRYFSGSLKDAAKSLGVCPTTMKRICRKHGISRWPFRKLAKANRSLDKIKCVFESVQGSSQAMVSPAPAVAAARRAPALPCLSSALRVASSQGSCQAPPPPQKEATWRKPLHGGDAGVVTVKANYRGDIIRFRVPSSAGVATVKGEVAKRLGLEAGEFDVKYLDDDNEWVLLSCDADFQECLDVVPALSGASTSSGSGMAQPVVRLMVQEVAEIHGSSCGSSD

SEQ ID NO: 493 - protein, 1009 aa, Trema levigata
MSESEEETTPSFPPKSSSSKEVVPDVREVLMDFDLDLDNPWPMMDQIAFVSNPMSPLLFSSSTDQPCSPLWAFADAENNDDDNNNNSNNSNKLGRHVSSVIADSSRFSCNSNSVAERPAENEERKIVPSPFLGFVPVDNPNGYYLIKERMTQALRYLKDSTDQHVLAQIWAPVKNGCRNVLTTSGQPFVLDTDSNGLHQYRMASLMYMFSVDGETNEVLGLPGRVFRQKLPEWTPNVQYYSIREYPRLDYAQHYNVRGSLALPVFEPSGQSCVGVLELIMTSEKINYAPEVDKVCKALAGSKLEKCRYIRSYKHEICNEGRQNALTEILEILTAACETYKLPMAQTWVPCMHRNVLAYGGGMKKNCTSIDGSCMGQVCMSTTELAFYIIDAHMWGFREACLEHHLQKGQGVAGRAFYSRNLCFCGDITQFCKTEYPLVHYARMFGLTSCFAVCLQSSHTGNDNYVLEFFLPPSITNASEQSALLGSLLATMKKHFQSLKVASGIGLEEEGIVELVKVSAIGGLESSLECIQIPKSAESPPGPIALPNGGDMVQQDLLKQQLTVDLDTANVGQDAAHDGGSINHVSVSENKETKKTSERKRGKTEKSISLEVLQQYFAGSLKDAAKSLGVCPTTMKRICRQHGISRWPSRKINKVNRSLSKLKRVIESVQGAEGAFGLTPLATSPLPVAVASISRPSTSNGTNQQHSPSNIPSEPPMEMKDSPTTSSPRREGQVETEDQLQGGGVLSQKEFIHENGGCFSPEINRGSNHSKSGSGSREASVGTPTSHGSCQGSPANGSVIVKDPFVYSIHEQCIKVEGSPESAPQPTDELHFSVPDALVTAECQEPFGGMLIEDAGSSKDLRNLCPAADAVLDEPVPEYCWINSTCSDLAPKQTSGIITQTQPNVIVRLRQEMKSVTIKATYREDIIRFRISLSSNIVELKDEVAKRLKLELGTFDIKYMDDDQEWVLIACDADLQECMDVCRSSGSNMIRLLIHDIMPNLGSSCESTEE

SEQ ID NO: 494 - protein, 932 aa, Trema orientalis
MSESEEETTPSFPPKSSSSSKEVVPDVREGLMDFDLDLDNPWPMMDQIAFVSNPITGNSNSVAERPAENEERKIVPSPFLGLVPVDNPNGYYLIKERMTQALRYLKDSTDQHVLAQIWAPVKNGCRYVLTTSGQPFVLDPDSNGLHQYRMASLMYMFSVDGETNEVLGLPGRVFRQKLPEWTPNVQYYSIREYPRLDYAQHYNVRGSLALPVFEPSGQSCVGAVNLRSADILDHTSTQICNEGRQNALTEILEILTAACETYKLPMAQTWVPCMHRNVLAYGGGMKKNCTSIDGSCMGQVCMSTTELAFYIIDAHMWGFREACLEHHLQKGQGVAGRAFYSRNLCFCGDITQFCKTEYPLVHYARMFGLTSCFAVCLQSSHTGNDNYVLEFFLPPSITNASEQSALLGSLLATMKKHFQSLKVASGIGLEEEGIVELVKVSAIGGLESSLECIQIPKSAESPPGPIALPNGGDMVQQDLLTQQLIVDLDTANVGQDAAHDGGSVNHVSVSENKETKKTSERKRGKTEKSISLEVLQQYFAGSLKDAAKSLGVCPTTMKRICRQHGISRWPSRKINKVNRSLSKLKRVIESVQGAEGAFGLTPLATSPLPVAVASISRPSTSNGTNHQHSPSNIPSEPPMERKDSPTTSSPRREGQVETEDQLQGGGVLSQKEFIHENGGFFSPEINRGSNHSKSGSGSGEASVGTPTSHGSCQGSPANGSVIVKDPFVYSIHEQCIKVEGSPESAPQPTDELHFSVPDALVTAECQEPFGGMLIEDAGSSKDLRNLCPAADAVLDEPVPEYCWINSTCSDLAPKQTSGVITQTQPNVIVRLRQEMKNVTIKATYREDIIRFRISLSSNIVELKDEVAKRLKLELGTFDIKYMDDDQEWVLIACDADLQECMDVCRSSGSNMIRLLIHDIMPNLGSSCESTEE

SEQ ID NO: 495 - protein, 1007 aa, Trema tomentosa
MSESEEETTPSFPPKSSSSKEVVPDVREVLMDFDLDLDNPWPMMDQIAFVSNPTSPLLFSSSTDQPCSPLWAFADAENNDDDDDNNNSNNSNKLGRHVSSAIADSSRFSCNSNSVAERPAENEERKIVPSPFLGLVPVDNPNGYYLIKERMTQALRYLKDSTDQHVLAQIWAPVKNGCRYVLTTSGQPFVLDPDSNGLHQYRMASLMYMFSVDGETNEVLGLPGRVFRQKLPEWTPNVQYYSIREYPRLDYAQHYNVRGSLALPVFEPSGQSCVGVLELIMTSEKINYAPEVDKVCKALEAVNLRSADILDHTSTQICNEGRQNALTEILEILTAACETYKLPMAQTWVPCMHRNVLAYGGGLKKNCTSIDGSCMGQVCMSTTELAFYIIDAHMWGFREACLEHHLQKGQGVAGRAFYSRNLCFCGDITQFCKTEYPLVHYARMFGLTSCFAVCLQSSHTGNDNYVLEFFLPPSITNASEQSSLLGSLLATMKKHFQSLKVASGIGLEEEGIVELVKVSAIGGLESSLECIQIHKSAESPPGPIALPNGGDMVQQDLLTQQLIVDLDTANVGQDAAHDGGSVNHVSVSENKETKKTSERKRGKTEKSISLEVLQQYFAGSLKDAAKSLGVCPTTMKRICRQHGISRWPSRKINKVNRSLSKLKRVIESVQGAEGAFGLTPLATSPLPVAVTSISRPSTSNGTNHQHSRSNIPSEPPMERKDSPTTSSPRREGEVETEDQLQGGGILSQKEFIHENGGFFSPEINRGSNHSKSGSGSGEASVGTPTSHGSCQGSPANGSVIVKDPFVYSIHEQCIKVEGSPESAPQPTDELHFSVPDALGTAECQEPFGGMLIEDAGSSKDLRNLCPAADAVLDEPVPEYCWINSTYSDLAPKQTSGIITQTQPNVIVRQEMKSVTIKATYREDIIRFRISLSSNIMELKDEVAKRLKLELGTFDIKYMDDDQEWVLIACDADLQECMDVCRSSGGNMIRLLIHDIMPNLGSSCESTE

SEQ ID NO: 496 - protein, 741 aa, Trifolium pratense
MTQALRQFKEWTEQNVLAQVWAPVRNGNRYKLTTSGQPFVLDPHSNGLHQYRTVSLMYMFSVDGENDEILGLPGRVFQQKLPEWTPNVQYYSSKEYSRLNHALHYNVRGTLALPVFEPPGQSCVAVLELIMTSQKINYAPEVDKVCKALEAVNLRSSEILEYPYSQVLFTTMHDAFSLFIVTIVICNEDRQNALSEILEILTVVCETHNLPLAQTWVPCRHRSVLAHGGGLKKSCSSFDGYCMGQVCMSITEVAFYVIDSHTWGFHDACVEHHLQQGQGVAGRAFLSQNMCFCENITQFCKTDYPLVHYALMFDLTSCFSICLQSFHTGNDEYVLEFFLPPSISEFSEHKALLGSILATMKQNFQSLKVASGFELGEDGSIEIVEILNGRVHSRLESVPIIQSEKLSTRHDDASPNMDEGVLPLDPLQQKIITSFDDINDRGILDDNPGGSIARISSLETKTKKKTSQRKRGKAEKSISLDVLQNYFSGSLKDAAKSLGVCPTTMKRICRQHGISRWPSRKIKKVNRSLSKLKCVIESVHGVEGAFGLNSPTTSPLHIASNKLEHQTSLSIMPSEPKMNENDFDASKSQPQEPFIGMLIEGADSCSKDLKNMCPLADAVLEDHILEASRTNPPCFDYAPLAQKEIKIVTIKATYRDDIIRFRVSLNCGIVELREEISKRLKLEVGTFDIKYLDDDQEWILVACDADLQECIDILTSSGSNTIRLVVHDIVSILGSSVESSE

SEQ ID NO: 497 - protein, 980 aa, Trifolium pratense
MPESEEENQDFPPKTKTSLEEHVCAMDFDLDLETSWPLDHMSFISNPMSPFLFSTISDQPSSPLWNFTDGEDENHNKLAASAFSDCHKIFSCDSNSITEKPVEKDDNKTLLPPLLPPIEHLDRYCGIKEKMTQALRYFKELTEMNVLAQVWAPVRNGNRFVLTTSGQPFMLDPHSNGLNQYRTVSLMYKFSVDGENDGTLGLPGRVFQQKLPEWSPNVLYYSSKEYPRRDHAQHYNVRGTLALPVFEPSLPSCIGVLELIMTSPKINYAPEVEKICKALEAVNLRSSEILDHPFTQICNEGRQNALSEILEILTVVCETHNLPLAQTWVPCRHRSVLAHGGGFKKSCSSFDGSCMGQVCMSTTEVASYIIDAHLWGFREACVEHHLQHGQGVAGRAFLSQNMSFCSNITQFCKTDYPLVHYALMFGLTGCFAICLRSFYTGDDDYVLEFFLPPGITEFHEQKTLLGSILATLKEHFQSLKIAAGVELEENGSIEIIEATDEGIRLRTESIPIAQSIKSPFIPDASPNMEEVPQDDPSGIHGEDIGGSINPMSPLGNKNIKKPSERKRGKTEKSISLEVLQRYFAGSLKDAAKSLGVCPTTMKRICRQHGISRWPSRKINKVNRSLSKLKRVIESVQGAEGAFDLNSLSNNQLPIVSSFPEPSTPNKSNQQGSLNIKPSEPQMKENEFDASKVSETNIQAVMEDQLLGGRKHSLDKEVINDKGVSIREIGNDRKRTRTRSGSSEDSTNPASHGSCHGSPPNEISTVKDLFIPSNNEQCIVLRGSPESRVQPTNAFNSPTAHCLPDNVLAELQEPFGGMLIEDAGSSKDLRNLCPSVAEAILEDMAPEACGTNLPGSYMAPPKQCMDTINNNNSVMPFAVRKEMKTVTIKATYREDIIRFRVSLNCGIVELKEEVSKRLKLEVGTFDIKYMDDDNEWVLIACDADLQECMFVSRSSGGSNIIRVLVHDITSNLGSSCESSGE

SEQ ID NO: 498 - protein, 964 aa, Trifolium subterraneum
MPESEEENQDFPPKTKTSLEEHVCAMDFDLDLETSWPLDHMSFISNPMSPFLFSTISDQPSSPLWTFTDGEDENHNKLAASAFSDCHKIFSCDSNSITEKPVEKDENKTLLPPLLPPIENLDRYCGIKEKMTQALRYFKELTEMNVLAQIWAPVRNGNRFVLTTSGQPFVLDPHSNGLNQYRTVSLMYKFSVDGENDGTLGLPGRVFQQKLPEWSPNVLYYSSKEYPRRDHAQHYNVRGTLALPVFEPSLPSCIGVLELIMTSPKINYAPEVEKICKALEICNEGRQNALSEILEILTVVCETHNLPLAQTWVPCRHRSVLAHGGGFKKSCSSFDGSCMGQVCMSTTEVASYIIDAHLWGFREACVEHHLQHGQGVAGRAFLSQNMSFCSNITQFCKTDYPLVHYALMFGLTGCFAICLRSLYTGDDDYVLEFFLPPGITEFHEQKTLLGSILATMKEHFQSLNIASGVELEENGSIEIIEATDEGIRLRTEYIPIAQSIKSPLIPDASPNMEEVPQDNPSGIHGEDVGGSIDPMSSLANKNIKKPSERKRGKTEKSISLEVLQRYFAGSLKDAAKSLGVCPTTMKRICRQHGISRWPSRKINKVNRSLSKLKRVIESVQGAEGAFDLNSLGNNQLPIVSSFPEPSTPNKSNQQGSLSIKPSEPQMKENEFDASKASETNIHVVMEDQLLGGRKHSLDKEVINDKGVSIQEIGKDRKRTRTRSGSSEDSTNPASHGSCHGSPPNEMSNVKDLFIPSNNEQCVVLRGSPESRVQPTNAFNSPTAHCLPDNVLAELQEPFGGMLIEDAGSSKDLRNLCPSVAEAILEDMAPEACGTNLPGSYMAPPKQCMDTINNNNSVMPFAVRKEMKTVTIKATYREDIIRFRVSLNCGIVELKEEVSKRLKLEVGTFDIKYMDDDNEWVLIACDADLQECLYVSRSSGGSNIIRVLVHDITSNLGSSCESSGE

SEQ ID NO: 499 - protein, 850 aa, Trifolium subterraneum
MQESEEENHDLAKKSKPLEENGFSMDFDIDFENLWPLDHISNTMYPFLLSTTSEQHFSPIWTFSDVEDDSIAASGNNTKTETDNRVENDDKKKHVTPHHVEVVPNLQTLHGYCLIKERMTQALRQFKELTEQNVLAQVWAPVRNGNRYKLTTSGQPFVLDPHSNGLHQYRTVSLMYMFSVDGENDEILGLPGRVFQQKLPEWTPNVQYYSSKEYSRLNHALHYNVRGTLALPVFEPPGQSCVAVLELIMTSQKINYAPEVDKVCKALEAVNLRSSEILEYPYSQICNKDRQNALSEILEILTVVCETHNLPLAQTWVPCRHRSVLAHGGGLKKSCSSFDGYCMGQVCMSITEVAFYVIDSHTWGFHDACVEHHLQQGQGVSGRAFLTQNMCFCENITQFCKTDYPLVHYALMFDLTSCFSICLQSSHTGNDEYVLEFFLPPSIIEFCEHKALLGSILAIMKQNFQSLKVASGFELEEDGSIEIVEILNGRVHSRVESVPIIQSEKLSTRHDDASPNMEEGVLPLDPLQQKVITSFDDINDRRILDVNTGGNIDRISSLETKTKKKTSQRKRGKAEKSISLDVLQNYFSGSLKDAAKSLGVCPTTMKRICRQHGISRWPSRKIKKVNRSLSKLKCVIESVHGVEGAFGLNSPTTSPLHIASSSFNQPSTSNKFEHQTALNIIPSEPKMNENYLNASKSQPQEPFIGMLIEGADSCSKDLKNMCPLADTVLEDQILEASRTNPPCFDFAPLAEKEMKIVTIKATYRDDIIRFRVSLNCGIVELREEISKRLKLEVGTFDIKYMDDDQEWILVACDADLQECMDILTSSGSNIIRLVVHDIVSILGSSVEISE

SEQ ID NO: 500 - protein, 732 aa, Trifolium subterraneum
MTQALRQFKELTEQNVLAQVWAPVRNGNRYKLTTSGQPFVLDPHSNGLHQYRTVSLMYMFSVDGENDEILGLPGRVFQQKLPEWTPNVQYYSSKEYSRLNHALHYNVRGTLALPVFEPPGQSCVAVLELIMTSQKINYAPEVDKVCKALEAVNLRSSEILEYPYSQICNKDRQNALSEILEILTVVCETHNLPLAQTWVPCRHRSVLAHGGGLKKSCSSFDGYCMGQVCMSITEVAFYVIDSHTWGFHDACVEHHLQQGQGVSGRAFLTQNMCFCENITQFCKTDYPLVHYALMFDLTSCFSICLQSSHTGNDEYVLEFFLPPSIIEFCEHKALLGSILAIMKQNFQSLKVASGFELEEDGSIEIVEILNGRVHSRVESVPIIQSEKLSTRHDDASPNMEEGVLPLDPLQQKVITSFDDINDRRILDVNTGGNIDRISSLETKTKKKTSQRKRGKAEKSISLDVLQNYFSGSLKDAAKSLGVCPTTMKRICRQHGISRWPSRKIKKVNRSLSKLKCVIESVHGVEGAFGLNSPTTSPLHIASSSFNQPSTSNKFEHQTALNIIPSEPKMNENYLNASKSQPQEPFIGMLIEGADSCSKDLKNMCPLADTVLEDQILEASRTNPPCFDFAPLAEKEMKIVTIKATYRDDIIRFRVSLNCGIVELREEISKRLKLEVGTFDIKYMDDDQEWILVACDADLQECMDILTSSGSNIIRLVVHDIVSILGSSVEISE

SEQ ID NO: 501 - protein, 933 aa, Triticum aestivum
MDIDPSSVSHADGGGDLWPFDSLTTSLFFSSVSSSPPLHPLPVASSSWLTPPSPLWLFEDRQMMPIEVGPAPAAAPDNTAAVAEEAQRARSGNSDTPIKKTERLNNKWQFNLALHDDSTNSSCLFKEKLTHALRYFKESTDQHLLVQVWAPVKSGDRYVLTTSGQPFVLDHQSIGLLQYRAVSMMYMFSVDGDNAGELGLPGRVYKQKVPEWTPNVQYYSSTEYPRLNHAISYNVHGTVALPVFDPSVQSCIAVVELIMTSKKINYADEVDKVCKALEAVNLKSTEILEHPNVQICNEGRQSALVEILEILTVVCEEHKLPLAQTWVPCKYRSVLAHGGGVKKSCLSFDGSCMGEVCMSTSDVAFHVIDAHMWGFRDACVEHHLQKGQGVSGKAFIYHRPCFSKDISQFCKLEYPLVHYARMFGLAGCFAICLQSPYTGDDYYMLEFFLPPSCKEEDDQNALLESILGLINQCLRNLKVAGNGESNKASLQLSNVIMIESEDFKTNVHFENSEGFRESPEGETHGGAHEFDKANSKVSEGHLLADDNSHNNGVSVSRPNGSAASDSSLLHKNGKPPERRRGKAEKTISLEVLQQYFSGSLKNAAKSLGVCPTTMKRICRQHGISRWPSRKINKVNRSLSKLKQVIESVQGSDAAFNLTSITGPLPTIPVGPSSDSFNKEKASESKAEHSNRAVDGDRDSSLQKSQETGSHFGALMSQQGFADTGNNVQLEADKASLSRSSSGEGSINSRTSEGSCQGSPANQTFVCQPIASMFLEPQEPQLNPEGFTKEPFQEPELPLSRMLIEDSGSSKDLKNLFGSAIGQPMLAPPSNFGPMRNSGTVTIKASFKEDIVRFRFPCSSSVMALKDEVAKRLRMDAGMFDIKYLDDDHEWVKLACNADLEECIEISRHSGTHVIRLLVSDVAAHIGSSCGSSG

SEQ ID NO: 502 - protein, 881 aa, Triticum urartu
MPIEVGPAPAAAPDNTTAVAEETQRARSGNSDTPIKKTERLNNKWQFNLALHDDSTNSSCLFKEKLTHALRYFKESTDQHLLVQVWAPVKSGDRYVLTTSGQPFVLDHQSIGLLQYRAVSMMYMFSVDGDNAGELGLPGRVYKQKVPEWTPNVQYYSSTEYPRLNHAISYNVHGTVALPVFDPSVQSCIAVVELIMTSKKINYADEVDKVCKALEAVNLKSTEILEHPNVQICNEGRQSALVEILEILTVVCEEHKLPLAQTWVPCKYRSVLAHGGGVKKSCLSFDGSCMGEVCMSTSDVAFHVIDAHMWGFRDACVEHHLQKGQGVSGKAFIYHRPCFSKDISQFCKLEYPLVHYARMFGLAGCFAICLQSPYTGDDYYMLEFFLPPSCKEEDDQNALLESILGLIHQCLRNLKVAGNGESNEASLQLSNVIMIESEDFKTNVHFENPEGFRESPEGDTHGGAHEFDKANSKVSEGHLLADDNSQNNGVSVSRPNGSAASDSSLLHKNGKPPERRRGKAEKTISLEVLQQYFSGSLKNAAKSLGGLKWQQNVAACMCPTTMKRICRQHGISRWPSRKINKVNRSLSKLKQVIESVQGSDAAFNLTSITGPLPTIPVGPSSDSFNKEKASESKAEHSNRAVDGDRDSSLQKPQENGSHFGALMSQQGFADTGNNVQLEADKASLSRSSSGEGSINSRTSEGSCQGSPANQTFVCQPIASMFLEPQEPQLNPEGFTKEPFQEPELPLSRMLIEDSGSSKDLKNLFGSAIGQPMLAPPSNFGPMRNSGTVTIKASFKEDIVRFRFPCSSSVMALKDEVAKRLRMDAGMFDIKYLDDDHEWVKLACNADLEECIEISRHSGTHVIRLLVTDVAAHIGSSCGSSG

SEQ ID NO: 503 - skipped

SEQ ID NO: 504 - protein, 988 aa, Vigna angularis
MSESEEENTDCVPRSKPAEEVGCTMDFDLDLETSWPLDHMSFGSNPMSPFLFSSNSDQPYSPLWAFSDGEDAKFPASAFSDCHKIFPCDSNSIAEKPEENDDNKKLLPPLAPMTPLENVGGYCVIKERMTQALRYFKELTELNVLAQVWAPVRNGNRYVLTTSGQPFVLDPHSNGLHQYRTVSLMYMFAVDGENDGSLGLPGRVFQQKLPEWTPNVLYYSSKEYPRRDHAQHYNVRGSLALPVFEPALQSCVGVLELIMTSQKINYAPEVDKICKALETVNLRSSEILDHPYTQICNEGRQNALSEILEILTVVCETHNLPLAQTWIPCKHRSVLAQGGGVKKICSSFDGSCMGKVCMSTTDVAFYIIDAHLWGFREACVEHHLQQSQGVAGRAFLSHSMCFCSSITQFCKTDYPLVHYALMFGLTSCFAICLRSSHTGTDDYVLEFFLPPRVTDFHEQKTLLASILATMKQHFQSLKIASGVELEDGSIEIIEATIERIHTRHESIPIAPSIRSPPRPDTSPNMEEEVSLDPSEQHILMYCNGTNHGANLSDKAGGKIDHMITLETKTSKKPLERKRGKTEKSISLEVLQRYFAGSLKDAAKSLGVCPTTMKRICRQHGISRWPSRKINKVNRSLSKLKRVIESVQGAEGAFGLNSLSTSPLPIAVGSLPEPSTRNKFSQPVSMSIRPSEPQMKVNELNASKELETNREAGMEDQLVGGRIHNLERVTNDKGGSTQEIGKEPKRTRTGSGSSEDSTNPTSHGSWHDSIPNESSPVKDIFITSNHDQCAVLRRSPESTLQPATNTPNQATPFCMPEFVAAELQEPFGGMLIEDAGSSKDLRNLCPSVAEAILEDLVPEACGTNPPALDLSPKQSMGTPNKAVTPFAATKEMKTVTIKATYREDIIRFRVSLTCGIVELKEEVAKRLKLEVGTFDIKYLDDDHEWVLIACDADLQECMDVSRSPGSNIIRVLVHDITSNLGSSCESSGE

SEQ ID NO: 505 - protein, 876 aa, Vigna angularis
MTPLENVGGYCVIKERMTQALRYFKELTELNVLAQVWAPVRNGNRYVLTTSGQPFVLDPHSNGLHQYRTVSLMYMFAVDGENDGSLGLPGRVFQQKLPEWTPNVLYYSSKEYPRRDHAQHYNVRGSLALPVFEPALQSCVGVLELIMTSQKINYAPEVDKICKALETVNLRSSEILDHPYTQICNEGRQNALSEILEILTVVCETHNLPLAQTWIPCKHRSVLAQGGGVKKICSSFDGSCMGKVCMSTTDVAFYIIDAHLWGFREACVEHHLQQSQGVAGRAFLSHSMCFCSSITQFCKTDYPLVHYALMFGLTSCFAICLRSSHTGTDDYVLEFFLPPRVTDFHEQKTLLASILATMKQHFQSLKIASGVELEDGSIEIIEATIERIHTRHESIPIAPSIRSPPRPDTSPNMEEEVSLDPSEQHILMYCNGTNHGANLSDKAGGKIDHMITLETKTSKKPLERKRGKTEKSISLEVLQRYFAGSLKDAAKSLGVCPTTMKRICRQHGISRWPSRKINKVNRSLSKLKRVIESVQGAEGAFGLNSLSTSPLPIAVGSLPEPSTRNKFSQPVSMSIRPSEPQMKVNELNASKELETNREAGMEDQLVGGRIHNLERVTNDKGGSTQEIGKEPKRTRTGSGSSEDSTNPTSHGSWHDSIPNESSPVKDIFITSNHDQCAVLRRSPESTLQPATNTPNQATPFCMPEFVAAELQEPFGGMLIEDAGSSKDLRNLCPSVAEAILEDLVPEACGTNPPALDLSPKQSMGTPNKAVTPFAATKEMKTVTIKATYREDIIRFRVSLTCGIVELKEEVAKRLKLEVGTFDIKYLDDDHEWVLIACDADLQECMDVSRSPGSNIIRVLVHDITSNLGSSCESSGE

SEQ ID NO: 506 - protein, 1040 aa, Vigna angularis
MSESKEENPDFLPKSKPQEEHGFAMDFDIGFESLWPLDHLSLVSNPMSPFLLSTIEQPFSPVWAFSDVEDEQIRIATAGNTKAVIENPVENYDNKKYVSPSLVAVPPSENSDGYCLIKERMTQALRHFKELTEQNVLAQVWAPVRNGNRYALTTSGQPFVLDPHSNGLHQYRTVSLRYMFSVDGENDEILGLPGRVFQQKIPEWTPNVQYYSSKEYQRLNHAQHYNVRGTLALPVFEPAGHSCVAVLELIMTAPKINYAPEVDKICKALEAVNLRSSEILEHPYNQVVFYYHASLILFIFSKDIYIYTYIYMYVCICIYVCCSVISILPLCYHRYNLAILLNQICNEDRQHALAEILEILTIVCETHSLPLAQTWVPCKHRSVLAHGGGHKKSCSSFDGCCMGQVCMSITEVAFYVIDAHTWGFHEACVEHHLQQGQGVAGRAFLSHNMCFCGNITQFCKTEYPLVHYALMFGLTSSFAVCLQSSHTGNDEYVIEFFLPPRITEFNEQKTLLRSILATMKPHFQSLKIAAGVELEQNCSIEIIEPRKERVHLWFESIPITQSSMSPPRHASPSMGERLPLEPSEQQITTDFDDINDGRNLGDNTDGHIDQNTSLEPRTKKKPSERKRGKAEKSISLDVLQHYFTGSLKDAAKSLGVCPTTMKRICRQHGISRWPSRKIKKVNRSLSKLKCVIESVHGAEGAFGLNSLSNGSLPIAAGSFSEPSTSNKFNCQTSLTIRPSEPKINEQDFDASRASEKNRQAGLEAHFLSTRTQNPEKAINEKVVAVQEIGTKGTTRFRTGSGSSEESANPSPHGSCQGSPPNEMSPPKDIFVTGTSEQCLVLRGSLGSTLHSTSTPNRATANPMPNFVETTEPQEPFGGQLLEGVGSSKDLRNLCRSADAVLEDQVPEPCRMNPQCSDLAPVQHMDTNNMTPFAVRKELKNVTIKASYKEDIIRFKISLNCGIVELKEEIAKRLKLEEGTFDIKYLDDDHEWVLIACDADLQECMDISRSSGSNIIRLVVHDILPILGSSCESSGDWKGCI

SEQ ID NO: 507 - protein, 983 aa, Vigna angularis
MSESKEENPDFLPKSKPQEEHGFAMDFDIGFESLWPLDHLSLVSNPMSPFLLSTIEQPFSPVWAFSDVEDEQIRIATAGNTKAVIENPVENYDNKKYVSPSLVAVPPSENSDGYCLIKERMTQALRHFKELTEQNVLAQVWAPVRNGNRYALTTSGQPFVLDPHSNGLHQYRTVSLRYMFSVDGENDEILGLPGRVFQQKIPEWTPNVQYYSSKEYQRLNHAQHYNVRGTLALPVFEPAGHSCVAVLELIMTAPKINYAPEVDKICKALEAVNLRSSEILEHPYNQICNEDRQHALAEILEILTIVCETHSLPLAQTWVPCKHRSVLAHGGGHKKSCSSFDGCCMGQVCMSITEVAFYVIDAHTWGFHEACVEHHLQQGQGVAGRAFLSHNMCFCGNITQFCKTEYPLVHYALMFGLTSSFAVCLQSSHTGNDEYVIEFFLPPRITEFNEQKTLLRSILATMKPHFQSLKIAAGVELEQNCSIEIIEPRKERVHLWFESIPITQSSMSPPRHASPSMGERLPLEPSEQQITTDFDDINDGRNLGDNTDGHIDQNTSLEPRTKKKPSERKRGKAEKSISLDVLQHYFTGSLKDAAKSLGVCPTTMKRICRQHGISRWPSRKIKKVNRSLSKLKCVIESVHGAEGAFGLNSLSNGSLPIAAGSFSEPSTSNKFNCQTSLTIRPSEPKINEQDFDASRASEKNRQAGLEAHFLSTRTQNPEKAINEKVVAVQEIGTKGTTRFRTGSGSSEESANPSPHGSCQGSPPNEMSPPKDIFVTGTSEQCLVLRGSLGSTLHSTSTPNRATANPMPNFVETTEPQEPFGGQLLEGVGSSKDLRNLCRSADAVLEDQVPEPCRMNPQCSDLAPVQHMDTNNMTPFAVRKELKNVTIKASYKEDIIRFKISLNCGIVELKEEIAKRLKLEEGTFDIKYLDDDHEWVLIACDADLQECMDISRSSGSNIIRLVVHDILPILGSSCESSGDWKGCI

SEQ ID NO: 508 - protein, 988 aa, Vigna radiata
  var. radiata
MSESEEENTDCVPRSKPAEEGGCTMDFDLDLETSWPLDHMAFGSNPMSPFLFSSNSDQPYSPLWAFSDGEDTKFPASAFSDCHKIFPCDSNSIAEKPEENDDNKKILPPLAPMPPLENVGGYCVIKERMTQALRYFKELTELNVLAQVWAPVRNGNRYVLTTSGQPFVLDPHSNGLHQYRTVSLMYTFAVDGENDGSLGLPGRVFQQKLPEWTPNVLYYSSKEYPRRDHAQHYNVRGSLALPVFEPALQSCIGVLELIMTSQKINYAPEVDKICKALETVNLRSSEILDHPYTQICNEGRQNALSEILEILTVVCETHNLPLAQTWIPCKHRSVLAQGGGVKKICSSFDGSCMGKVCMSTTDVAFYIIDAHLWGFREACVEHHLQQSQGVAGRAFLSHSMCFCSNITQFCKTDYPLVHYALMFGLTSCFAICLRSSHTGTDDYVLEFFLPPRITDFHEQKTLLASILATMKQHFQSLKIASGVELEDGSVEIIEATIERIHTRLESIPIAPSIRSPPRPDTSPNMEEEGPLDPSEQHILMYCNGTNHGSNLSDQAGGKIDHMITLETKTSKKPLERKRGKTEKSISLEVLQRYFAGSLKDAAKSLGVCPTTMKRICRQHGISRWPSRKINKVNRSLSKLKRVIESVQGAEGAFGLNSLGTSPLPIAVGSLPEPSTPDKFSQPVSMNIRPSEPQMKVNELNASKELETNREAGMEDQLVGGRIHNIERVTNDKRGFTQEIGKEPKRTRTGSGSSEDSTNPPSHGSWHDSIPNESSHVKDLFITSNHDQCAVLRRSPESTLQPATNTPNQSTPFRMPEFVAAELQEPFGGMLIEDAGSSKDLRNLCPSVAEAILEDLVPEACGTNPPALDLSPKQSMGAPNKTVTPFAATKEMKTVTIKATYREDIIRFRVSLTCGIVELKEEVAKRLKLEMGTFDIKYLDDDHEWVLIACDADLQECMDVSRSSGSNIIRVLVHDMTSNLGSSCESSGE

SEQ ID NO: 509 - protein, 984 aa, Vigna radiata
  var. radiata
MSESKEENPDFLPKSKPQEEHGFAMDFDIGLESLWPLDHISSVSNPMSPFLLSTIEQPFSPVWAFSDVEDEKQIRIAIAGNTKAVTENPVENYDNKKYVSPSLVAVPPSENSDGYCLIKERMTQALRHFKELTEQNVLAQVWAPVRNGNRYALTTSGQPFVLDPHSNGLHQYRTVSLRYMFSVDGENDEILGLPGRVFQQKIPEWTPNVQYYSSKEYQRLNHAQHYNVRGTLALPVFEPAGQSCVAVLELIMTSPKINYAPEVDKICKALEAVNLRSSEILEHPYNQICNEDRQHALAEILEILTIVCETHSLPLAQTWVPCKHRSVLAHGGGHKKSCSSFDGCCMGQVCMSITEVAFYVIDAHTWGFHEACVEHHLQQGQGVAGRAFLSHNMCFCGNITQFCKTEYPLVHYALMFGLTSSFAVCLQSSHTGNDEYVIEFFLPPRITEFNEQKTLLRSILATMKPHFQSLKIAAGVELEQNCSIEIIEARKERVHLWFESIPITQSSMSPPRHASPNMGERLPLEPSEQQTTTDFDDINDGRNLGDNTDGHIDQNTSLEPRTKKKPSERKRGKAEKSISLDVLQHYFTGSLKDAAKSLGVCPTTMKRICRQHGISRWPSRKIKKVNRSLSKLKCVIESVHGAEGAFGLNSLSTGSLPIAAGSFSEPSTSNKFNRQTSLTIRPSEPKINEQDFDASRASETNRQAGLEGQFLSTRTQNPEKVINEKVVAIQEIGTKGTTRFRTGSGSSEESANPSPHGSCQGSPPNEMSPPKDIFVTGISEQCLVLRGSLGSTLHSTSIPNHATAYPIPNFVETTEPQEPFGGQLLEGVGSSKDLRNLCPSTDAVLEDQVPEPYRMNPQCSDLAPVQHRDTNNMTPFAVRKEVKNVTIKATYREDIIRFKISLNCVIVELKEEIAKRLKLEEGTFDIKYLDDDHEWVLIACDADLQECMDISRSSGSNIIRLVVHDILPILGSSCESSGDWKCCI

SEQ ID NO: 510 - protein, 921 aa, Zea mays
MDFDPSPASAHGDGSGGAWPFDSLTTSMLFSSVSASPQLPASSSSWLTPPSPLWLFEDRHLLPLDAPSAAPEAAVAAAVVEEVQRARSGKRVDQINHKWQFHLSLDEDGTDNSSFFKEKLTQALRYFKESTDQHLLVQVWAPVKNGDRYVLTTSGQPFVLDHQSIGLLQYRAVSMMYMFSVDGENAGDLGLPGRVYKQKVPEWTPNVQYYSSGEYQRLNHAISYNVHGTVALPVFDPSAQSCIAVVELIMTSKKINYACEVDKVCKALEAVNLKSTEILDHPNVQICNEGRQAALVEILEILTVVCEEHKLPLAQTWVPCKYRSVLAHGGGLKKSCLSFDGSCMGEVCMSTSDVAFHVIDAHMWGFRDACVEHHLQRGQGVSGKAFISHKPCFSKDIRKFCKLAYPLVHYARMFGLSGCFAICLQSSYTGNDDYILEFFLPLDCIDEDDQNALLESILTLMKRCLRSLKLVDDNDLSGVSLHLSNVLKLENEESKTDAQFDGSLRESPEDDRHGGSHKFDNENQKVLDITEGQLLTDDYSQDNGTSVGRPNGSGASDSSLLHKTNKPPERRRGKAEKTISLEVLQQYFSGSLKNAAKSLGVCPTTMKRICRQHGISRWPSRKINKVNRSLSKLKQVIESVQGSDAAFNLTSITGPLPIPVGPSPESLNVEKLTQSKVAELSNLAVGVDRDSLQKSLENDDHFDIVMAQQGFIDNNNDVQLEADKASHSRSSSGEGSINSRTSEGSCQGSPANQTFVCKPIASMFAEPQLNQEEFNKEPFQEPQLPLSRMLIEDSGSSKDLKNLFTSTSDQPFLAPPNNLVSMKHSGTVTIKASFKEDIVRFRFPCSGGVIVLKEEVAKRLRMDVGTFDIKYLDDDHEWVKLACNADLEECMEISRLSGSHVIRLLVSDIAAHFGSSCGSSG

SEQ ID NO: 511 - protein, 873 aa, Zea mays
MAATLGCSTPCPRRSTFRPFRPRCRRRGRAATRIILPCGWTRLPCKTTARASPPEKLTVALMYFKESTKQHLLVQVWVPIRKGDHYMLSTSGQPFVLDEQSIGLLDYRAVSMMYTFAVDGDSVEELGLPGRVYKQRLPEWTPDVQYYSSIEYARLNHAISYDVHGTVALPVFDSSMKSCIAVVELIMTSKKVNYAREVGEVSKALEAVNLKSTEVIEHPYVQIFNEGHQNVLVEMLEIITVICEELKLPIAQTWVPCKYQNLLIHCGGENKSCFDIHESCAQELCMSTSAVMFHIIDAHMWGFRDACVEHHLKKGQGVSGKAFILRRPCFTKDVTRFSKMEYPLVHYARMFGLAGCFSICLQSAYNRNEDYVLEFFLPPDCREDGEQKVLLDSILALLRQYLNRLQVATDEGSNEVYLQVDAITIIENGDIKNAHVQHMNCEGGIHASDERNMHVIHESDSQKRISPTESETCPSPDNTKCNDKLFARQNGGCISDSLLLENNSKHSGRRQGKEEKTFSLEVIQQYFTGSLKNAAKSLGVCPTTMKRICRQHGISRWPSRQISKVNRTVSKLKKVIESVEGHEGAFTLTSVTGPLPVAFGPSNPISIKNQSQINVSGLPIPSVQENRDSSSQSKLLENDIHRSTLVPQKSFLANINRQIEAEKASNSRNSSKDCRTHSGRSEESYPVSPANMTFVSTLLEPQQNMYIQDGFTKESFQKEDLRFHGMFVNGSGSLKDCMNHITSAVNGTIIGHPGSLTTAQNSGIITCPGSLISAQNSRIVTVKARYKEDLLRFRFPCSGSFITLKDEVAKRIQMDGVLFDIKYLDDDHEWVKLTCDTDLEECMEISRASGSNVLRLLVTDIAPVLGSSCGSTG

SEQ ID NO: 512 - protein, 927 aa, Zea mays
MDFDPSPASAHGDGSGGAWPFDSLTTSMLFSSVSASPQLPASSSSWLTPPSPLWLFEDRHLLPLDAPSAAPEAAVAAAVVEEVQRARSGNSHTTGKRVDQINHKWQFHLSLDEDGTDNSSFFKEKLTQALRYFKESTDQHLLVQVWAPVKNGDRYVLTTSGQPFVLDHQSIGLLQYRAVSMMYMFSVDGENAGDLGLPGRVYKQKVPEWTPNVQYYSSGEYQRLNHAISYNVHGTVALPVFDPSAQSCIAVVELIMTSKKINYACEVDKVCKALEAVNLKSTEILDHPNVQICNEGRQAALVEILEILTVVCEEHKLPLAQTWVPCKYRSVLAHGGGLKKSCLSFDGSCMGEVCMSTSDVAFHVIDAHMWGFRDACVEHHLQRGQGVSGKAFISHKPCFSKDIRKFCKLAYPLVHYARMFGLSGCFAICLQSSYTGNDDYILEFFLPLDCIDEDDQNALLESILTLMKRCLRSLKLVDDNDLSGVSLHLSNVLKLENEESKTDAQFDGSLRESPEDDRHGGSHKFDNENQKVLDITEGQLLTDDYSQDNGTSVGRPNGSGASDSSLLHKTNKPPERRRGKAEKTISLEVLQQYFSGSLKNAAKSLGVCPTTMKRICRQHGISRWPSRKINKVNRSLSKLKQVIESVQGSDAAFNLTSITGPLPIPVGPSPESLNVEKLTQSKVAELSNLAVGVDRDSLQKSLENDDHFDIVMAQQGFIDNNNDVQLEADKASHSRSSSGEGSINSRTSEGSCQGSPANQTFVCKPIASMFAEPQLNQEEFNKEPFQEPQLPLSRMLIEDSGSSKDLKNLFTSTSDQPFLAPPNNLVSMKHSGTVTIKASFKEDIVRFRFPCSGGVIVLKEEVAKRLRMDVGTFDIKYLDDDHEWVKLACNADLEECMEISRLSGSHVIRLLVSDIAAHFGSSCGSSG

SEQ ID NO: 513 - protein, 916 aa, Zea mays
MDLDPAYPPSACADAWPFDSLTTSLLFSPQLTPIPANSSFSWLTPHSPLWLFEDRHLLPLDAPAVFEEVQRPRSGNSHTSSKPAEQISHRWQFHLSLDEDGTDNSSLFKEKLTHALRYFKESTDQHLLVQVWAPVKNGDRYVLTTSGQPFVLDHQSIGLLQYRAVSMTYMFSVDAENVGDLGLPGRVYKQKVPEWTPNVQYYSSGEYQRLNHAISYNVHGTVALPVFDPSAHSCIAVVELIMTSKKINYACEVDKVCKALEAVNLKSTEIHDHPNVQICNEGRQAALVEILEILTVVCEEHKLPLAQTWVPCKYRSVLAHGGGLKKSCLSFDGSCMGEVCMSTSDVAFHVIDAHMWGFRDACVEHHLQRGQGVPGKAFISHKPCFSKDIRKFCKLAYPLVHYARMFGLAGCFAICLQSSYTGNDDYILEFFLPPDCSDEDDQNALLESVLTLMKRCLRSLKVVGDRDLSGVSLHLSNVLKLENEEFKTDAQFDNSDGSLCQSPNGDRHGGSHEFDGGNKKVLDVPEGQLLTDDFSQGNGTSAGRPNGSGASDSSVLHKTNKPPERKRGKAEKTISLEVLQQYFSGSLKNAAKSLGVCPTTMKRICRQHGISRWPSRKINKVNRSLSKLKQVIESVQGSDAAFNLTSITGPLPIPVGPSLDSLNVEKLTQSKVAELSNIAVDGDRDSLQKSLGNDGHFGIVMPQQGSTDHNNDTQLEADKASHSRSSSGEGSINSRTSEGSCQRSPANQTFVCKPIASTFAEPQLNPEEFNKEPFQEPQLPLSRMLIEDSGSSKDLKNLFTSTSDQPFLAPPNNLVPMKHSGSVTIKASFKEDIVRFRFSCSGSVIVLKEEVAKRLRMDVGTFDIKYLDDDHEWVKLTCNSDLEECMEISRLSGSHVIRLSVSDIATHFGSSCGSSG

SEQ ID NO: 514 - protein, 647 aa, Zea mays
MDLDPAYPPSACADAWPFDSLTTSLLFSPQLTPIPANSSFSWLTPHSPLWLFEDRHLLPLDAPAVFEEVQRPRSGNSHTSSKPAEQISHRWQFHLSLDEDGTDNSSLFKEKLTHALRYFKESTDQHLLVQVWAPVKNGDRYVLTTSGQPFVLDHQSIGLLQYRAVSMTYMFSVDAENVGDLGLPGRVYKQKVPEWTPNVQYYSSGEYQRLNHAISYNVHGTVALPVFDPSAHSCIAVVELIMTSKKINYACEVDKVCKALEAVNLKSTEIHDHPNVQICNEGRQAALVEILEILTVVCEEHKLPLAQTWVPCKYRSVLAHGGGLKKSCLSFDGSCMGEVCMSTSDVAFHVIDAHMWGFRDACVEHHLQRGQGVPGKAFISHKPCFSKDIRKFCKLAYPLVHYARMFGLAGCFAICLQSSYTGNDDYILEFFLPPDCSDEDDQNALLESVLTLMKRCLRSLKVVGDRDLSGVSLHLSNVLKLENEEFKTDAQFDNSDGSLCQSPNGDRHGGSHEFDGGNKKVLDVPEGQLLTDDFSQGNGTSAGRPNGSGASDSSVLHKTNKPPERKRGKAEKTISLEVLQQYFSGSLKNAAKSLGVCPTTMKRICRQHGISRWPSRKINKVNRSLSSSPYSCWPFIGFSQCREINSK

SEQ ID NO: 515 - protein, 603 aa, Zea mays
MDLDPAYPPSACADAWPFDSLTTSLLFSPQLTPIPANSSFSWLTPHSPLWLFEDRHLLPLDAPAVFEEVQRPRSGNSHTSSKPAEQISHRWQFHLSLDEDGTDNSSLFKEKLTHALRYFKESTDQHLLVQVWAPVKNGDRYVLTTSGQPFVLDHQSIGLLQYRAVSMTYMFSVDAENVGDLGLPGRVYKQKVPEWTPNVQYYSSGEYQRLNHAISYNVHGTVALPVFDPSAHSCIAVVELIMTSKKINYACEVDKVCKALEAVNLKSTEIHDHPNVQICNEGRQAALVEILEILTVVCEEHKLPLAQTWVPCKYRSVLAHGGGLKKSCLSFDGSCMGEVCMSTSDVAFHVIDAHMWGFRDACVEHHLQRGQGVPGKAFISHKPCFSKDIRKFCKLAYPLVHYARMFGLAGCFAICLQSSYTGNDDYILEFFLPPDCSDEDDQNALLESVLTLMKRCLRSLKVVGDRDLSGVSLHLSNVLKLENEEFKTDAQFDNSDGSLCQSPNGDRHGGSHEFDGGNKKVLDVPEGQLLTDDFSQGNGTSAGRPNGSGASDSSVLHKTNKPPERKRGKAEKTISLEVLQQYFSGSLKNAAKSLGGRKPLLSA

SEQ ID NO: 516 - protein, 644 aa, Zea mays
MDLDPAYPPSACADAWPFDSLTTSLLFSPQLTPIPANSSFSWLTPHSPLWLFEDRHLLPLDAPAVFEEVQRPRSGNSHTSSKPAEQISHRWQFHLSLDEDGTDNSSLFKEKLTHALRYFKESTDQHLLVQVWAPVKNGDRYVLTTSGQPFVLDHQSIGLLQYRAVSMTYMFSVDAENVGDLGLPGRVYKQKVPEWTPNVQYYSSGEYQRLNHAISYNVHGTVALPVFDPSAHSCIAVVELIMTSKKINYACEVDKVCKALEAVNLKSTEIHDHPNVQICNEGRQAALVEILEILTVVCEEHKLPLAQTWVPCKYRSVLAHGGGLKKSCLSFDGSCMGEVCMSTSDVAFHVIDAHMWGFRDACVEHHLQRGQGVPGKAFISHKPCFSKDIRKFCKLAYPLVHYARMFGLAGCFAICLQSSYTGNDDYILEFFLPPDCSDEDDQNALLESVLTLMKRCLRSLKVVGDRDLSGVSLHLSNVLKLENEEFKTDAQFDNSDGSLCQSPNGDRHGGSHEFDGGNKKVLDVPEGQLLTDDFSQGNGTSAGRPNGSGASDSSVLHKTNKPPERKRGKAEKTISLEVLQQYFSGSLKNAAKSLGVCPTTMKRICRQHGISRWPSRKINKVNRSSPYSCWPFIGFSQCREINSK

SEQ ID NO: 517 - protein, 1117 aa, Zea mays
MEAVSMSPSTVSSHTHDDHDAASVTEAMSLQEGLLFSDTLKDLRNLRSQLYSAAEYFEVFYRNNSHKSTVMTSLKDYTVEALVSTVDHLGFVSYKVDNLVSEKAVEVKETEFLVSSVEQMIVLLTQSASLDLLESSIHPVSEPPRYSRQYTGRKMHKSQSSISTPVRRQATMRNKGRLPDTKFQPDGTVRLYGCKKTAFELEAFETSFHAVAQRLGAAGEKLKQRQEGFPQLTPIPANSSFSWLTPHSPLWLFEDRHLLPLDAPAVFEEVQRPRSGNSHTSSKPAEQISHRWQFHLSLDEDGTDNSSLFKEKLTHALRYFKESTDQHLLVQVWAPVKNGDRYVLTTSGQPFVLDHQSIGLLQYRAVSMTYMFSVDAENVGDLGLPGRVYKQKVPEWTPNVQYYSSGEYQRLNHAISYNVHGTVALPVFDPSAHSCIAVVELIMTSKKINYACEVDKVCKALEAVNLKSTEIHDHPNVQICNEGRQAALVEILEILTVVCEEHKLPLAQTWVPCKYRSVLAHGGGLKKSCLSFDGSCMGEVCMSTSDVAFHVIDAHMWGFRDACVEHHLQRGQGVPGKAFISHKPCFSKDIRKFCKLAYPLVHYARMFGLAGCFAICLQSSYTGNDDYILEFFLPPDCSDEDDQNALLESVLTLMKRCLRSLKVVGDRDLSGVSLHLSNVLKLENEEFKTDAQFDNSDGSLCQSPNGDRHGGSHEFDGGNKKVLDVPEGQLLTDDFSQGNGTSAGRPNGSGASDSSVLHKTNKPPERKRGKAEKTISLEVLQQYFSGSLKNAAKSLGVCPTTMKRICRQHGISRWPSRKINKVNRSLSKLKQVIESVQGSDAAFNLTSITGPLPIPVGPSLDSLNVEKLTQSKVAELSNIAVDGDRDSLQKSLGNDGHFGIVMPQQGSTDHNNDTQLEADKASHSRSSSGEGSINSRTSEGSCQRSPANQTFVCKPIASTFAEPQLNPEEFNKEPFQEPQLPLSRMLIEDSGSSKDLKNLFTSTSDQPFLAPPNNLVPMKHSGSVTIKASFKEDIVRFRFSCSGSVIVLKEEVAKRLRMDVGTFDIKYLDDDHEWVKLTCNSDLEECMEISRLSGSHVIRLSVSDIATHFGSSCGSSG

SEQ ID NO: 518 - protein, 980 aa, Zea mays
MAPHLTPHHSLLPSSSVSPSPPAPPLPPPTSPLAAAFRRPVTLAQPAAARFHPMDFDPSPASAHGDGSGGAWPFDSLTTSMLFSSVSASPQLPASSSSWLTPPSPLWLFEDRHLLPLDAPSAAPEAAVAAAVVEEVQRARSGNSHTTGKRVDQINHKWQFHLSLDEDGTDNSSFFKEKLTQALRYFKESTDQHLLVQVWAPVKNGDRYVLTTSGQPFVLDHQSIGLLQYRAVSMMYMFSVDGENAGDLGLPGRVYKQKVPEWTPNVQYYSSGEYQRLNHAISYNVHGTVALPVFDPSAQSCIAVVELIMTSKKINYACEVDKVCKALEAVNLKSTEILDHPNVQICNEGRQAALVEILEILTVVCEEHKLPLAQTWVPCKYRSVLAHGGGLKKSCLSFDGSCMGEVCMSTSDVAFHVIDAHMWGFRDACVEHHLQRGQGVSGKAFISHKPCFSKDIRKFCKLAYPLVHYARMFGLSGCFAICLQSSYTGNDDYILEFFLPLDCIDEDDQNALLESILTLMKRCLRSLKLVDDNDLSGVSLHLSNVLKLENEESKTDAQFDGSLRESPEDDRHGGSHKFDNENQKVLDITEGQLLTDDYSQDNGTSVGRPNGSGASDSSLLHKTNKPPERRRGKAEKTISLEVLQQYFSGSLKNAAKSLGVCPTTMKRICRQHGISRWPSRKINKVNRSLSKLKQVIESVQGSDAAFNLTSITGPLPIPVGPSPESLNVEKLTQSKVAELSNLAVGVDRDSLQKSLENDDHFDIVMAQQGFIDNNNDVQLEADKASHSRSSSGEGSINSRTSEGSCQGSPANQTFVCKPIASMFAEPQLNQEEFNKEPFQEPQLPLSRMLIEDSGSSKDLKNLFTSTSDQPFLAPPNNLVSMKHSGTVTIKASFKEDIVRFRFPCSGGVIVLKEEVAKRLRMDVGTFDIKYLDDDHEWVKLACNADLEECMEISRLSGSHVIRLLVSDIAAHFGSSCGSSG

SEQ ID NO: 519 - protein, 1144 aa, Zea mays
MEAVSMSPSTVSSHTHDDHDAASVTEAMSLQEGLLFSDTLKDLRNLRSQLYSAAEYFEVFYRNNSHKSTVMTSLKDYTVEALVSTVDHLGFVSYKVDNLVSEKAVEVKETEFLVSSVEQFFTPLVLMIDCRGFEFANRQLTRRQDPSKLFLSRRQSLDLLESSIHPVSEPPRYSRQYTGRKMHKSQSSISTPVRRQSTMRNKGRLPDTKFQPDGTVRLYGCKKTAFELEAFETSFDAVAQRLGAAGEKLKQRQEGFPQLTPIPANSSSSWLTPHSPLWLFEDRHLLPLDAPAVFEEVQRPRSGNSHTSSKPAEQISHRWQFHLSLDEDGTDNSSLFKEKLTHALRYFKESTDQHLLVQVWAPVKNGDRYVLTTSGQPFVLDHQSIGLLQYRAVSMTYMFSVDAENVGDLGLPGRVYKQKVPEWTPNVQYYSSGEYQRLNHAISYNVHGTVALPVFDPSAHSCIAVVELIMTSKKINYACEVDKVCKALEAVNLKSTEIHDHPNVQICNEGRQAALVEILEILTVVCEEHKLPLAQTWVPCKYRSVLAHGGGLKKSCLSFDGSCMGEVCMSTSDVAFHVIDAHMWGFRDACVEHHLQRGQGVPGKAFISHKPCFSKDIRKFCKLAYPLVHYARMFGLAGCFAICLQSSYTGNDDYILEFFLPPDCSDEDDQNALLESVLTLMKRCLRSLKVVGDRDSSGVSLHLSNVLKLENEEFKTDAQFDNSDGSLCQSPNGDRHGGSHEFDGGNKKVLDVPEGQLLTDDFSQGNGTSAGRPNGSGASDSSVLHKTNKPPERKRGKAEKTISLEVLQQYFSGSLKNAAKSLGVCPTTMKRICRQHGISRWPSRKINKVNRSLSKLKQVIESVQGSDAAFNLTSITGPLPIPVGPSLDSLNVEKLTQSKVAELSNIAVDGDRDSLQKSLENDGHFGIVMPQQGYIDHNNDTQLEADKASHSRSSSGEGSINSRTSEGSCQRSPANQTFVCKPIASTFAEPQLNPEEFNKEPFQEPQLPLSRMLIEDSGSSKDLKNLFTSTSDQPFLAPPNNLVPMKHSGSVTIKASFKEDIVRFRFSCSGSVIVLKEEVAKRLRMDVGTFDIKYLDDDHEWVKLACNSDLEECMEISRLSGSHVIRLSVSDIATHFGSSCGSSG

SEQ ID NO: 520 - protein, 914 aa, Zea mays
MEFDFDSHGGDAWLLDAMSTSLHFSAVSPPVPSPWPCGDPHHPSMWLDTVALQDDGPSVPAEKSEISKKCEHLNGKCQVHLSLVDGCSDSSYFLKEKLTVALMYFKESTKQHLLVQVWVPIRKGDHYMLSTSGQPFVLDEQSIGLLDYRAVSMMYTFAVDGDSVEELGLPGRVYKQRLPEWTPDVQYYSSIEYARLNHAISYDVHGTVALPVFDSSMKSCIAVVELIMTSKKVNYAREVGEVSKALEAVNLKSTEVIEHPYVQIFNEGHQNVLVEMLEIITVICEELKLPIAQTWVPCKYQNLLIHCGGENKSCFDIHESCAQELCMSTSAVMFHIIDAHMWGFRDACVEHHLKKGQGVSGKAFILRRPCFTKDVTRFSKMEYPLVHYARMFGLAGCFSICLQSAYNRNEDYVLEFFLPPDCREDGEQKVLLDSILALLRQYLNRLQVATDEGSNEVYLQVDAITIIENGDIKNAHVQHMNCEGGIHASDERNMHVIHESDSQKRISPTESETCPSPDNTKCNDKLFARQNGGCISDSLLLENNSKHSGRRQGKEEKTFSLEVIQQYFTGSLKNAAKSLGVCPTTMKRICRQHGISRWPSRQISKVNRTVSKLKKVIESVEGHEGAFTLTSVTGPLPVAFGPSNPISIKNQSQINVSGLPIPSVQENRDSSSQSKLLENDIHRSTLVPQKSFLANINRQIEAEKASNSRNSSKDCRTHSGRSEESYPVSPANMTFVSTLLEPQQNMYIQDGFTKESFQKEDLRFHGMFVNGSGSLKDCMNHITSAVNGTIIGHPGSLTTAQNSGIITCPGSLISAQNSRIVTVKARYKEDLLRFRFPCSGSFITLKDEVAKRIQMDGVLFDIKYLDDDHEWVKLTCDTDLEECMEISRASGSNVLRLLVTDIAPVLGSSCGSTG

SEQ ID NO: 521 - protein, 915 aa, Zea mays
MDLDPAYPPSACADAWPFDSLTTSLLFSPQLTPIPANSSFSWLTPHSPLWLFEDRHLLPLDAPAVFEEVQRPRSGNSHTSSKPAEQISHRWQFHLSLDEDGTDNSSLFKEKLTHALRYFKESTDQHLLVQVWAPVKNGDRYVLTTSGQPFVLDHQSIGLLQYRAVSMTYMFSVDAENVGDLGLPGRVYKQKVPEWTPNVQYYSSGEYQRLNHAISYNVHGTVALPVFDPSAHSCIAVVELIMTSKKINYACEVDKVCKALEAVNLKSTEIHDHPNVQICNEGRQAALVEILEILTVVCEEHKLPLAQTWVPCKYRSVLAHGGGLKKSCLSFDGSCMGEVCMSTSDVAFHVIDAHMWGFRDACVEHHLQRGQGVPGKAFISHKPCFSKDIRKFCKLAYPLVHYARMFGLAGCFAICLQSSYTGNDDYILEFFLPPDCSDEDDQNALLESVLTLMKRCLRSLKVVGDRDLSGVSLHLSNVLKLENEEFKTDAQFDNSDGSLCQSPNGDRHGGSHEFDGGNKKVLDVPEGQLLTDDFSQGNGTSAGRPNGSGASDSSVLHKTNKPPERKRGKAEKTISLEVLQQYFSGSLKNAAKSLGVCPTTMKRICRQHGISRWPSRKINKVNRSLSKLKQVIESVQGSDAAFNLTSITGPLPIPVGPSLDSLNVEKLTQSKVAELSNIAVDGDRDSLQKSLGNDGHFGIVMPQQGSTDHNNDTQLEADKASHSRSSSGEGSINSRTSEGSCQRSPANQTFVCKPIASTFAEPQLNPEEFNKEPFQEPQLPLSRMLIEDSGSSKDLKNLFTSTSDQPFLAPPNNLVPMKHSGSVTIKASFKEDIVRFRFSCSGSVIVLKEEVAKRLRMDVGTFDIKYLDDDHEWVKLTCNSDLEECMEISRLSGSHVIRLSVSDIATHFGSSCGSS

SEQ ID NO: 522 - protein, 685 aa, Zea mays
DVISSFIALSLCFYYPGNSHTTGKRVDQINHKWQFHLSLDEDGTDNSSFFKEKLTQALRYFKESTDQHLLVQVWAPVKNGDRYVLTTSGQPFVLDHQSIGLLQYRAVSMMYMFSVDGENAGDLGLPGRVYKQKVPEWTPNVQYYSSGEYQRLNHAISYNVHGTVALPVFDPSAQSCIAVVELIMTSKKINYACEVDKVCKALEAVNLKSTEILDHPNVQSILTLMKRCLRSLKLVDDNDLSGVSLHLSNVLKLENEESKTDAQFDGSLRESPEDDRHGGSHKFDNENQKVLDITEGQLLTDDYSQDNGTSVGRPNGSGASDSSLLHKTNKPPERRRGKAEKTISLEVLQQYFSGSLKNAAKSLGVCPTTMKRICRQHGISRWPSRKINKVNRSLSKLKQVIESVQGSDAAFNLTSITGPLPIPVGPSPESLNVEKLTQSKVAELSNLAVGVDRDSLQKSLENDDHFDIVMAQQGFIDNNNDVQLEADKASHSRSSSGEGSINSRTSEGSCQGSPANQTFVCKPIASMFAEPQLNQEEFNKEPFQEPQLPLSRMLIEDSGSSKDLKNLFTSTSDQPFLAPPNNLVSMKHSGTVTIKASFKEDIVRFRFPCSGGVIVLKEEVAKRLRMDVGTFDIKYLDDDHEWVKLACNADLEECMEISRLSGSHVIRLLVSDIAAHFGSSCGSSG

SEQ ID NO: 523 - protein, 1009 aa, Ziziphus jujuba
MSESEEETPSFPPKSKDVVDDVREAALMDFDLEIASPWPLDQIAFVSNPMSPLTFSSTEQPYSPLWAFCDGDNDEKLAGNVNSPIADCPRMISCDSNSVTETPAEKMNEDKRVWISPLLGPAPIENLDGYCLIKEKMNQALRYLKDSTDQHILAQVWAPVKNGCQYVLATSGQPFVLDPHSNGLHQYRMVSLMYMFSVDGDSEGALGLPGRVFRQKLPEWTPNVQYYSIREYPRLGHAQHYNVQGTLAVPVFEPSGQACVGVLELIMTSPKINYAPEVDKVCKALEAVNLKSSEILDHTGTQICNEGRQNALTEILEILTVVCETHKLPMAQTWVPCMHRNVLTYGGGLKKSCTSFDGSCMGQVCMSITDVAFYIIDSSMWRFREACLEHHLQKGQGVAGRAFLTHNLCFCADITQFCKIEYPLVHYARMFGLTSCFAICLRSTHTGDDDYILEFFLPPSISDSSQQQIFLGSLLATMKKHFQSLRVASGVGFDEEVFVEIIQASSSEGLDSRLECIQVSQSPESSPGPNILSNVGDIVQPDSSPHQLIEDFCAANDRSTAAQDGRSHSHVSLRESKDTKKTSERKRGKTEKSISLEVLQQYFAGSLKDAAKSLGVCPTTMKRICRQHGIPRWPSRKINKVNRSLSKLKRVIESVQGAEGAFGLTPLSSSPLPVSVASVSQPFMLNGTNSPSPKACEPLTEKKKQQTSFSLGREGLAGMEEPLLGGVLRPEELIHENIRFLPEIGRGLNQSKSGSSSREASAGTPTSHGSCQGSPANGSAAEKDYLASCQDSPANGTTIIKDPISSIHEQCVKVDVSPESALQPTDELLKFPVACSIDALVTTESQEPFGRMLIEDAGSSKDLRNLCPTADAILDEQVPEFCWVNPQCLDLATKLPMGTLAPTTSHLKPRQEMKSVTIKATYREDIIRFRITLGSGIVELKEEVAKRLKLEVGTFDIKYMDDDHEWVLIACDADLQECMDICISSGSNMIRLLVHDIMPNLGSSCESTE

SEQ ID NO: 524 - protein, 822 aa, Ziziphus jujuba
MSESEEETPSFPPKSKDVVDDVREAALMDFDLEIASPWPLDQIAFVSNPMSPLTFSSTEQPYSPLWAFCDGDNDEKLAGNVNSPIADCPRMISCDSNSVTETPAEKMNEDKRVWISPLLGPAPIENLDGYCLIKEKMNQALRYLKDSTDQHILAQVWAPVKNGCQYVLATSGQPFVLDPHSNGLHQYRMVSLMYMFSVDGDSEGALGLPGRVFRQKLPEWTPNVQYYSIREYPRLGHAQHYNVQGTLAVPVFEPSGQACVGVLELIMTSPKINYAPEVDKVCKALEAVNLKSSEILDHTGTQICNEGRQNALTEILEILTVVCETHKLPMAQTWVPCMHRNVLTYGGGLKKSCTSFDGSCMGQVCMSITDVAFYIIDSSMWRFREACLEHHLQKGQGVAGRAFLTHNLCFCADITQFCKIEYPLVHYARMFGLTSCFAICLRSTHTGDDDYILEFFLPPSISDSSQQQIFLGSLLATMKKHFQSLRVASGVGFDEEVFVEIIQASSSEGLDSRLECIQVSQSPESSPGPNILSNVGDIVQPDSSPHQLIEDFCAANDRSTAAQDGRSHSHVSLRESKDTKKTSERKRGKTEKSISLEVLQQYFAGSLKDAAKSLGVCPTTMKRICRQHGIPRWPSRKINKVNRSLSKLKRVIESVQGAEGAFGLTPLSSSPLPVSVASVSQPFMLNGTNSPSPKACEPLTEKKKQQTSFSLGREGLAGMEEPLLGGVLRPEELIHENIRFLPEIGRGLNQSKSGSSSREASAGTPTSHGSCQGSPANGSAAEKDYLASCQDSPANGTTIIKDPISSIHEQCVKNLKNHLGEC

SEQ ID NO: 525 - DNA, 32767 bp, Medicago truncatula
  misc_feature 1733, 1734, 1735, 1736, 1737, 1738, 1739, 1740, 1741, 1742,1743, 1744, 1745, 1746, 1747, 1748, 1749, 1750, 1751, 1752,1753, 1754, 1755, 1756, 1757, 1758, 1759, 1760, 1761, 1762,1763, 1764, 1765, 1766, 1767, 1768, 1769, 1770, 1771: n = A,T,C or G
  misc_feature 1772, 1773, 1774, 1775, 1776, 1777, 1778, 1779, 1780, 1781,1782, 1783, 1784, 1785, 1786, 1787, 1788, 1789, 1790, 1791,1792, 1793, 1794, 1795, 1796, 1797, 1798, 1799: n = A,T,C or G
aagcttgataacacgaaacagcttgattaagagctaaaggatcagccaaaccaacatcctcacttgcaaaccgtacaagcctacgtgcaatataaagcggctcttcacctccctttaacattcttgccaaccaataaatcgctgcatcagcatcactacccctcatagacttatgcaatgcactaatcaaattatagtgttcttccccagctttatcataagcaagatgcttgcattgaagcgcctcctttgcatcctcaacactaacactaacagcaacatcctgacattcttcactatcatgttccactcgtgcagccgcattaacaccagcaatctccaacacattcaaagcaacgcgagcatcaccgtcgcaattattagctacaaaatcaaccacatcctcaccaacactaacatcaactttacaagaaccaaaaccaagacttttcaccaaccctttttccgtgtcattaacagcacgtttgagaagcaaaatgaggtgatgtggctgaagagggttaagagtaagaacacggcaacgcgacaacaatggtgtaatcaaatgaaaagaggggttttcagtagtagcaccaacaaaaacaatactaccatcttcaataacaggtaaaaatgaatcttattgagatttattaaacctatgaacttcatcaacaaacaaaacagtagtttgatttgttttaactctaactttcctagcttcatcaacagcttctctaacatctttaacaccgctcgtaaccgcggataaagatacaaaacgatacaaaggtgaatcttttgttgttgatgatgaattaacaatggcttttgcaatggtggttttacttgtacccggtggaccccactaaaggattgaaggtagacgtttgcgttgaattgattaacgaagaattgagtttgatgataagagatgatcttgtctgacaaccttgtcgagtgttctgggtcggagtcgttcgaacaatggttcatgtgtttgaggttgttgtttcatggaacttgttttgaagaagaatgaaggtttgttttgttgtgttggtgatagcttcgttcgtttgtttggttcttctgtttgttgttcttgttgttatgcttgaatgggttgttgtggggtttggaagaaacgatcgagtttgggttgaaaagcagaagaaggtgaagaggaaggggtgtgaatggtggaattggggggtttatgagtaagaatccattcagtggctttgacagtggatttaccaccagtggcagctaaggcttgagcggctaactcatcaggaaaacccatgctcagaagctgttgcatctccatctttctgatgatgatgatgattctgtgtattcttcttccaacaacttattacaaaccaaaccaaatcgtcttcattcttagtaagctttgtttggctgtgtcacattttaagtttagcttatagatagattaagttcatattataaatattaacttacgagggttcaattttattatctacttgcgaaagtcatttaattgatgattgaattggcttatcaaatctagcaaaaagcaaataacttattttattttagaggagtaaaacccaaaattatacaccataagtttatatatataaagaggcatttttcaataatcataaacataaacataaataaattgtgtttgggtacgcactaaaacatttttttcaataataaaataattaataatttannnnnnnnnnnnnnnnnnnnnnnnnnnnnnnnnnnnnnnnnnnnnnnnnnnnnnnnnnnnnnnnnnnttttataaggttttttctttaaataatatttttataagttacttccttcgattttaaatataaacaaaatcaaaatatatttgtccaaaataaagaccaaatactttttaactcttgtttatatttaaaattatgtttttttattcaaacaaagttttagtgtcttcctatctttattcttattcgacttttcgtatcatcattgcatattttaatactgtttcgggtttttttcttaatcaaatagctttggttctttctctctctgatagacaggtagagacatgaatcgttacccttgccatgtcttcatagactttaggtgcaagtcggggatcatagccagccgatgtcattagtagaagccagattgcccgatataatcagcttcaaattcaaacctgcaaattgtgaataaattgggttgagaacaggcatgagcaatgtatttatgaagacaatttcaactatcagaaaggagcattcgaccagagtattttaatcccatgctccaaataagatgcaaatcaaaatgaaccaaaggagcaatgtcaaatcatggttagatagttataacataaacttcaaaaattgacattgatacatccacatacgagataaggacacagatcatgaacctataaggcattggccaaactagtcccctacccacactatcaatgcaatcaaaactttatggtcttatttgtccatttaatttaatcattctagttggtgtttcaactatttttcaatgttactgttatatgcatgatttagtgtcattttagagtgtatagtaattggagggttttttaagtctgaaatgctgagaccgatactaacttaatctgacatatttagcctgcttggattccctatacttcttatcttcatgtcagtatgggctagcagaccctatatccacccactcattcaaacaatataactgagttggaatgatgaatgatcgattaaagaatggtactggttttgtttctgatgggaaccatagcaaaatatcacaattttgttgctctaatccaaactgaaattcatggaacaatttatattaaataactagtgtttttattttgtcaagatatttatgtttcaagtataaaatgtttaaaataaacataagaaatattactatacacataatttgctacaaaccaattaatcaaaaatgaacatgaaggaaaatagaaaagcagatgaaaatgatggaaatgtgtgtattattgatgatataggaaacagttaaatagtgtttatactctgccatttgagcaaattttagtttatttcacgtttaaaaaaatatatatcttcaatttcaaccttgtaatttgaagattatttggttttgaacctttgtgaaatttgattgtataaaatagataatattaacacgaggtaaaccgaaatttgatgcacatgaaagaaaacagaaaagcagatgaaattgatgaaaatatgtattattgattataaaggaaggaattaaatagtgttttacagcagcctatttgagcaagttttggtttatcacctaaaaaaaatctatttggattctggtcttataatttgaagattttttggttttggatctttggaaatttgattgtacaatgtagatgagatggcagggggtaaaccaaaatttgttaggcggctgaaatcaataaaacatacactttaacgggacgctgattttgattgtagctaagagttatattgattttgctatatggtggagaaatgtgagtttttaattttatttttttataaattttccgttaactataatgtgtttggttgtttcatgccttggccatttatatgcaacatgaaacaaccaaaaacatattaatagaaaagtagttaaaaactaacatttctccatgagacagcataattactataatgcttaactctaacgaagctcggcgtctctttaaagtgtaacttttattgatttaaggtgtccctaaccagcattcttatgccgattgggttttatccccatttagatttggtcaggccgctgtgaagaccatcaaagggtggagtttttaggattattatttgagtattagaggaaaattatgttagtgaagccatattggtgtattgaagaggaagagtgacaaagggtaaaatgcaattcaacgcgaagttgccttgccttgccttcacttacatctgcttatgaaaatatgcaagaaggttgccctagagtttgtaagcatgagagcaaccaattactctagcaagaatatcactagaaagagtgtattgaaacaaagaaagtatgttttggaatggacaagaagtttatttttgaagcttgaaactggtttttggaactgattttaaagtatgttttggaaaattcgatttcatacgtctgttagataatataaaagcctcttctgcgaatcacaatgctttagaacaccttcgtgaaaatttggtaacgcgaccaaattttgcactatccgcaaaagttactactgttattaacaatacaattggttagaaaaattagctaaaacaaccaaccggcatttatactaatggttagaaaactattcaaatgtattatcactaaatctttgtttggtatgtaatatttggatttttctttcttcgtttttatgttattaaatgagcagtatagtgtgacacaaatgatagatacttgagtctcttaatcatttagtctagaatccaatacttaaccggtgaatatgaaaaaatgattattggattttggtggaattttttttttgaaaattttgtaagtagcaaataaatttaaaaaaaaaaaaaagaccaaaacaaaaaataaatctagacatttgtccccttaaacgccacgtggagttaaaagaatgaaaagagatgaggaagtaatgttatatgttactgctcgctccttccttactcagtgactgaataataaagcaagcaatgaatgaaagcaacgcgataaccagaatcggaacttcaccaatcattcctcttccaatttcaacaacacaccccccaaatcaaattcacaccctaccaaatcaaaaacaaaaacaaaaacaaaaacaatggaacaaagctatcagcacaagcattcgttcacgtctcagcaaactctgccgcgaaggtcaacctcatctcgctcttcatcttctcgattctcttcctcgtccttccaccgtcgtctggaactccgtcatcatcggcttcatctgcaacaacttgcctcatcaagctcttcttttatacgccaaaatgagatcaaattcttcttgttctacttttgatccttatacattctcttccactcttaaagcttgtgctttaactaaagatattcttactggaaaagctatacattctcattttcttcgttctcattcgaatactaatactggtcctagtagaattgtatataactctttgttgaatatgtatgcttcttgtcaacatgagtatgcactcaatgtgtttgatgttatgcgtaggagaaatgttgttgcttggaatactttgattttgtcgtttgttaagatgaatcgttatcctcaagcggttgaggcatttgctaatatgattaatcaatctgttatgcctagtccggttacttttgtgaatctttttcctgctttgtcgaaattgggtgattctagaactgtgaagatgttttatgggtttatgaggaaatttggtgatcagtatgttagtgatgtgtttgttgtaagctctgcgatacttatgttttctgatgttggttgtatggattatgcgcgaatggtttttgatcgatgtttgaataaaaatactgagatttggaatactatgattgttgcgtatgttcaaaataattgcccggttgaagcgattgatgtgtttattcaagcgttggagtcggaggagggtgtatgcgatgatgtaactttgctctctgttcttactgctgtttcacagttgcagcaaatcaaattggctgaacagtttcatgcatttgttataaaaagtttgccgggttcgctgattataattttaaatgctgtaatggttatgtactcaaggtgtaatcatgttgatacttcgttgaaggtttttgataagatgttagaaagggatgctgtttcgtggaatactataatatctgcttttgtacagaatggttttgatgaggaagcgcttatgcttgtgtgtgaaatgcagaagcaaaagtttttgattgattctgttaccgcaactgcccttctttctgcagcttctaaccttaggaacttgtatgttggaaagcaaactcatgcttatctgattcgccgtgggatacagtttgagggcatggagagttatttgattgatatgtatgcaaaatccggctcgattaggactgctgaattgttgtttgagcagaactgctcaagtgatagagaccaggccacatggaatgctatcattgctggttatactcagaatgggctcaatgagaaagctattctccttcttaaacagatgttggtgcaaaacgtaataccaaatgcagtgacattggcatccattcttcctgcttgtagttcaatgggaagcatgggattggctaggcaacttcatggattctccattcgtcgtttcttggagaaaaatgtttatgtgggaacttccttaactgacacgtattccaaatgtggtgcaattagttacgctgaaaatgtctttttgagaacacctgagaagaattcagtcacatacaccacaatgatgatgtgctatggtcagcatgggatgggtaagagagctcttaccttgtatgattctatgctgagatctggcattaggcctgatgcagttacttttgttgccatcttgtctgcttgtaattatagtggattggttgacgaaggccttcaaatatttgaatctatggagaaagtacataaaatcaagccctcaatagaacattattgttgtgttgcagacatgttagggagggttgggagggtggttgaagcctatgagtttgtcaagggattgggtgaggatgctaacaccatggaaatctggggatctcttcttgggtcttgtagaaatcatgggcattttgaattaggaaaagctgttgctaaaaaattgctgaatatgggaatggataaaagaatggcaggatatcatgttctgctctcgaatatttatgctgaggaaggagagtgggaaaaagttgatagagtgagaaagcagatgaaagaaaaaggtctgcacaaggaaacgggatgtagttgggttgagattgctgggtttgtaaactgctttgtatctagagatgagaagcaccctcaaagtagtgaaatatattatatgttggacatgttgactctagacatgaagtatgcagggtataagccacaatatagcttaaatttaaatacgattttggattcggatgaatgaattgaataattatcacaagttatttcgagatgtgttggtttctttgtagtagacagttgtcacgaaagtgagctaggctcatcgttaagatagtcacagcctcacaagatctattataactgataatagtttcatgacctgcataaatttattctttgtacaccacaacagctgctggtttgaaactcttactcggggttttcattcatttgaaacagtttgtaatttgttaacaaaacaatcaatccatgtatattaccatagtgcaattggttacttacaaatttgatgatactttcacctccaattcatgaaacggaagttatacatagctatatatttaaacgaaaaagatggtttcatttatgatttagatgattcatgaatttaattttttttattgtaaaaaaccgctagaaggaggggttgaacctccgaccttgtggttaacagccacacgctctaaccaactgagctattccagcaattcgtgaggttaatgttttatttgaaatttaattttggcgagacattaacaacaaaggtatgacggtaaaagaaagaaatatagtgtgcttccacttatttattcccttctactacatgctaactaactatgctgaatacagggaagtgtcatacatagtattctaatgtgttttaggcgctgagtacagaagtgtcgtagtactctaataatgtgcttgaggcatcgacggttatcaacagtattgcaactatgtcggatttattattgatgattgtattaattttaatgtgttttttcacggtttaagtttcctgcatgtgttaggcatgaggttaaccaagttgtctattatttagctcaatactctcttcataatccggactatatatgaattgaagggactccatcttatatttctgcattcttgaaactcaattggggttggcggttggtttgaaacattggagtttatgttcgattgtctgaccttcattgattaaattatctttaatgtaaaaagaaaaaaaaaaaaaaaaaagagagagagaagtgacattgtattctctccaaacataattgagtttttctatttacaccccatgtttttctggttacacccaaattttcttaaaatttttttataataccaaaattgcccttttatataaattttcttaaaaccctaattttattcattgtcagtgagtttcaccctctttcaccccacaaagcgatcgatcaaacaatttgatgttcaatatcaatctccatgaaaattaaagagtgaatcaaaatatttttcatccatactcaattggatataagtaagtgaatttcttcttctatttgctagtttcaatttttttccttcaactgcactgatgcactgtacgattacggttttaatttacattggcaaggttaacttaaattcagtttaagtaggttcatgtaaacttagtttacatgaacctacttaaactgagtttacatgaacctacttaaactgagtttacatgaacctacttaaactgagtttacaaaatcgcagaactgtgaatcgcagaacaaggaaaacacaaaatcagaactgagaacccataacaagaaaaacacaatcgattgaagaacaacacttgctaacctgatttgcttcgaattttctttgaaatcatgaatggacgtgagaaagtatggttttgaaaatcttcgcagaacacaatcgatcgattggagaattatggttttggaagaagggttttggggtgtaaccaaaaaagaaggaataggctttttgaaaatcaaattttatgaaagggtaatcttgtcattttggggtgcaaccatgattaactagggtgcaagtagaaaaactcaacataattaaagtatctacacaatatagaatttggacatataagtgattcaatacccgctgagtgatacggattgagttttttttttatcttaaaaaacaattttgtttttaagaaaattttaagaactaatttttgtttgtttactatcataaaactttattttaattttaaattagaatctcttacactcaagtttcttgtttttagatgaaaaaaaaatagattttggaaaagctaataagaatagcttttatttttaagattaaaaaaaataaatttaccaaaataatttttatttttaaatctaaaacaaataccattaaaattgactttgaagcacgcaagaatatttgttattattatcctttaaagttgacattgaaaaactttcgacttagtggattgaaattatttagatgtgattatgaagaagatgaattttatagtatgaaaattgcttttttgacatagaaaacttcataaagacacaagtaaaatacgttaatgcccccagcggtagttaactaccgttggtagaaccgccggcagttaactgccgctgggactcagcggtagttaactgccgttgcttttttcccccaaaaccagaaaacccctacctcctattcactcatcaccttacatcatctccataccatacctcaaaaaaatcccatttcaaaaattgtgtcaaaatcttgcttccaaatcattgctgatcgattgctaggacgtttctacacacaatatgcatcaaagaacaggtattacaacgttaaaatccattacatttgattgatttttctggtttttttttttgtactgtcacgagctgtagcggcagttaactaccgctgggtgtgagcggctgttaactgccgctggtaacttagaaattttttcaaaacttcatttggcagtgctactgccaaaaaaaaaaaatcacaatatttttttcttttgtttttttggtttgtttatgatattagatacatgtttattaattagtttacaaattatatgttgtttatttatagatacggttgagaatgcggatgatgatccgggtgatcgaaaacctagtgttgtcgattccgttaaggttgaagctcccattaaggtcgaagcttccgtgaaggttgaagcttccgttaaagtagaggcttcaagcgtcaattccgatgtgtgtaaacttcgtgacaacgaagtggacacggctcatttcttttcgacacgagatacatggaaagataaagaggaattgctcggttgggtccgtcgacaagcaaatagggctggatttacggttatcattagaagatcttgtgaaggtagaaatgctatgttggagttggtttgtgaacggagcggcgagcacaaattaccgaagacaaaagtgaagcatgaagcaacgggatcaagaaaatgtgggtgtttgttcaaggtgcgtggatatgtcgtgagggaaaacaatgcttggaaattggctattcttaatggcgttcacaaccatgagatggtgcggtatgtagcagggcaccttcttgccggaagattaatggaggacgacaagaagattgtacatgacttgaccgattcttcggtgaaatattttgactaatttgaagaagaaaaggaaagagtccatcacaaatatcaagcaagtctacaatgaacgtcacaaattcaaaaaggcaaaaaggggtgacttgacggagatgcaatatctaatctcaaagttggaagagaatggatatgttcattacgtaagagaaaaaccggaaagtcaaaccgttcaagacatattttggactcatccaacatcggtaaagttgtttaacacttttccgactgttttgataatggattccacgtacaaaaccaacttgtatagaatgccattgtttgaaatagttggagtcacctcaacctatttgacatattcggttggttttgcatttatgacgtcggagaaggaggataactttacttgggctttgcaaatgttgcttaaacttcttgaaccaaatagtgatatgcctaaggtggtagtgaccgacagggacccgagtatgatgaaggccgtagaaaatgttctccccgatagtagtgcaatactttgttatttccatgttggcaaaaatgttagatcaagaatcatcaccgattgcaaagttaaacaaaatgttgttgtggtggatgggcaaaagaagattgtcgacgaggagagtcatagtaagttagttgataccatatttgatgcatgggaaaagatgtcactttgtactccgggttggggggtcacatgtctagacaagccatgaactttatttttgtggaagaagcgcgtgctaggaaaaccttgtgcatcgagaagaaaacttgcggttgtgttcaaaggacgtcgtatggcctaccttgtgcatgcttcattgctatgaaaatccgtcacaacaagcccattcgattggatgagatacacccgcattggcataagttgtatatgggtgaagaagaaagtaatgaagatttgttttcggtcgcggaggagtggcgtggtatccaagaacgtctcgaaagagttccgttccaaatgaaactagaaatcaaagagggtatgcggttgttagcgtttccggagaccacaatgttgtcaccacctccaaaaaaggtgccaaccaaaggagctcccaaaaaaatcaaaactacacgtaggatcccatctaagtgggagactattgattctcaacatccggaaagtcaatcttcaccacgaaaaaaatcttcacaacctaaaagaaaaggtgctcgcattggcatttctccggttcctaagcctagcttggtttcaagaaattatgatccatcgaatcctatgtattacatgccaaaattcatgagaccatacattgagggaattgtggatgttattggtgacggacattgtgggtttagggctattgccgaacgcgtgggtttgacggaagaaagtcatgttatggtgcggagagcacttattaaagagttgaaagagcataggaacaaatacatcgaggtatatgcgagcgcggaccgttacaagtacattttggatggattgcatcctcccaaaaatcctagtagctttgcacctcccgacaaatggttgacattgccggatatgggacacatcgttgcatcttgttacaataggccggtggtggagatgactacccttgatattggagtctccgagacttttttcccacttagaggtgcgcctccggttaatccgaaaagcaacatgatttgccttggtttaatcccaaatcattttgtcattctttcgttgaaagatggttgtccactacctccatcatccacggagtggagaaatcataggagcgatgaggcaaaaacatgggattatgaattcttggatcaacacgatcgtttccgagcactcatggagattgaggacaaagagagaccggttccaccaaaaaaaccaacaaatgaagacaatccaattatgtttgatgacactccggttaaaggaaacgaagaatttgaagatgttctggaacatttagatgatttgcttttgttagatgaaatatgacactttttggtcggtgttaatccgttttttggtcgatacgcgccgacgtattttttgggatatataatgtaatgaccaattttttgggtgatatgtaactaacctttaactaattatatatatatatatatatatatatatatatatatatatatttgagtttcgcatttattagtaattaatgtacattacgtgtaatgtgttgcataatgtggaaaatttgacgaatttcaaacaattgtgaaacgttaacgcattatcggttttgtgtaatgttaccgaataattgataaactatgaaatgttgatgtttgtgattgctggatgttgttgtttcggtttgatttcctccggaattgccgtttgaaattataggtaaaacatgacaaatttcctgggctggttctgttaactggtgtgaacggcagttaactgccgctgggggcaattatgtaaattacttgtgtcaataggaagtttcctatgtcaaaaaagcaattttcttacggtattgtggcgaaatggatcatgtaatgtgtagcatatatgcttgtcaatggtagccctcccaaccgatgaattcaatttgaaaagggaccagcgataaggagacctctatctccttttcttttgttgattgtcgtagaaggattggatgttatgctaaatgcaaccaaggaggttggtctgttatctggttataaatcggtcaatcaaagaaagtttgtgtttttgatatacaatttgtggccgatacattgattttggaagagaaagttgggcaaacctcataactctgaagactaaacttattctttttgaggtaatataaggtctcaaagtatttatatatatatatatatatatatatttttttttttggtctagactcaaagtatatatttaaagatacatatttaagaggtaatataaggctaaaaatatatttgagggccaaattaactactagatacacatttaaaaatcaaatgactcataaaagacacatttaagtttatttttgtaatttaatgtatataaagactataaaaatttaaaacaacacctcacacatttaaaaaattacaaacaattcactcatcacattggttggttctactagagtattattactttgcattttttgaaaaacaacacattaaaatgcataacaattactataatgaagtgttaaattacatactacatggtatatatttgaacaagttcaaaatgttagtccgggcaccaacctctacaccaacatgaatagatccgtccctaaccaaatctaaaacaaatcttattaaagtaaaaaatatccgacatagattttaaattgttgttgtgcattttatacctttactgtggaaacttggtgtccgtcatgagaactgattaatttgattgagggaccaatcttgctggctgaccaaatatagaaattgttagcaccaaaaaattgtgaacatgggatttagagatgagcatgctcctaagactcagagctacgccaccagatcaaccattgcggtacaccaccaaatcaaccattgtggttacattccacttaagtagcataacaatggtcaattaatttaattaataattttatctactttcaaataaaaaataattcaacatcttttaaataatatttcaaatattgacttatttgtttcaaacagatagaattcattagatcactatgacatatttttatcaaacatgcactcatttgatatcaaacactacttgcattgacatgataaaagtatcaaactaattgcataagatattttttatggttaggttaaaatatcatactaattgcatttgtatgataaaagtagggtatgtttctttgaaacgaatttggtgatagaatgttcgattgctcatgcataaaaaaattcaaattacactacttgcattgacatgataaaaagtgtggtaaatttctaacaaattaatagaatgttcatgcataaaaaattcaaaattactctatagaatttagtgatgaccgcaatatgtaatgcaacatctgtaacgatcgaaatcgagacaatcttaacgcgaccgcgatcgaaacagcggccattgtttaataccttgaatctaaagtaatttttatgatactagctagacaaacaaaaaaagtttcagattttttttaaataatcttttaaaaaatcccaaaattgttttatttgaatggaaacgtatgataaattcattagtaaaaatagatcattgtctgtggattgataaaaaagaaaataaataaataaatacacttatttgaagaaagacgcagaaaacctcggaagatcaatctccaacgaaatttccctacacacaaaggtatgtcattgcattcgattcattcattcctcaagtaacttggaacactgttatttcattttaggttaatattttcactaagtgaaattaacaacacccatttcttaaacttgttcaatttacaaaggtatgaatcaagctgtataactcaaccactttcctatatgctataatctattttcataagctgttttggacgattgattggattaacaccttatatttatagtcagtggcggaactggggttggcaagggggagccaccgccacccccattgtatacaggaaattactattatacccttcagtaatatgagtattcccaattctacttcatttcctctttccctttctctttcatcagaaacgcgattttctgaccagaccacaccaccgccgccgcaaccactctcacctccttctccatccatcaccgtcgcatcctcctccgttttctgtgttgattagagagctatctcatctctctccacaaaccctaattgttgtaacttgtaaggtaatgtgaaattgaatgtaatttccttcaattctgattctgatttgatgattacatgttctttagttgatttccatgagttttccatctgttgttgttaaacctagttgattagtgaatacatgtcttgtttgctgtatgaaatgttctgtgaaatgggtcatcaaaaaatttatgaaagtttgtgtctttatgctaaaatggtggttggaaagtgatttagtgtatagtttgtttcatgagttttgcatttgatttaactatgttatgtttttgttttagtactatgttgtgtttttcaatgttcttggtttaggaacaataacaaatgttgtttattcaaagcagtttgatgaaaagcctctttttcctttgcattgaatcaaagcctgctgtttatcaaatgttgttgatgcagcatgaatcgcagttacttacaaacgcggcgatatcaaaagccatgatgtcgcagctcacattgcggtcaaataatggctgcgtttcaatttttatggcggccaccccaaacatttttgtctggctccgccactgattatagtacaaattcataccatcataagtgcttatgtatcataagctatttctatagcaaaacatagaattgagtttttgttttttttttgtatatgctataagttgtttttataagctatcttggagaacttatgaaaataagctgaaaaaagcttatgaaaaatgtcataagctgttttcataagttctcccaaacagtctcacaaaacttatgccagtagataagctcaaataagccaatccaaacaggcccttggacaacttatgaaaataagctgaaaaaaagcctctgaaaaatatcataacttgttttcttaggttttcgttttcccatacttatttgtataataataatactgatcacaatctcccactctgcagcacatatgagcagtactcgacaacgaacccttggtggcgggggtcatcaagtattagactatctgaagcgcatgcgagcagagaatcatgctttcttttatgcagtccagagcgacgttgataacgcgggtgggaatatattttgggctgatgagacatgtagaacaaactactcttattttggggatactgttatattcgacacaacctataagactaaccagtaccgggtaccatttgcctctttcactgggtttaatcatcatggtcaacctgttttatttggctgtgctttgattctcaatgaatccgagccctcatatatatggctattcaaaacttggcttcgtgccgtctctggacgcccccctgtctccattacaacagacttggatcctgtcatacaagttgctgttgcccaagttcttcctccaactcgccaccggttctgtaaatggagcatattcagagaaaatagaagcaagctggcacatttgtatcaatcaaatcctacttttgacaacgaattcaagaaatgtgttcatgagagtgtgactattgatgagtttgagtcttgttggcgctcactattggaaagatactacatcatggataatgaatggcttcagtcaatgtacaatgcacgacagcattgggtccccgtctacttgcggggcagcttttttggagaaatacctttaaatgatggaaatgaatgtttgaactttttctttgatggacatgtgaatgcatccaccacattacagttgttggttagacaatatgagaaggctgtatcaacttggcatgaaagagaactaaaagcagattttgaaacttccaatagtaacccagttttaagaacaccgtctcctatggaaaagcaagctgcaagtctttatacgagaaagatgtttatgaaattccaagaggagttagtagggactatggcaaatcctgctacgaaaattgaagattcaggaactatcaccacttatcgagttgccaaatttggagaaaaccaaacatctcacactgtcgcttttaattcttctgagatgaaagctagttgcagttgccagatgtttgaatattcaggaatcgtttgtaggcatatattagcagtcttcagagctaaaaatgttcttacacttccgtcgcactatgtgttaaaacgctggacaatgaatgcgaaaactggtgtcgtgttagatgaacacacatctgaattgcctaacagttcacgcgagtctgcgacagtatgttacaaccatttgcgtcaagaagcaaccaagtacgtggaagaaggtgctaaatcaatccaaacatatcatgttgcaatgaaagctttgcaagaagctgctaagaaggtttctaccctaaaaaagcagattattggaacatcagaggtacttacaatagccaacggagacaggagtgagttgcttacaggaaatgaagatgtttcaagctatcaatctgtggttagtttctttgaacttgtcatctttctatagattgtaaagcattaggtaggatttctcactagggaaatcatataagagtctttacttgatgaattctataccgagctgcttccaaggaactatacttttactgtattattttatgtgttaaagcaaacgaaaattaaaattgtagaaaaggagggggaaggagaaactttcccccttgtacaattgataagcagggacttggaaatcattcatcttgttttctaggtaatcattttctgtgttgctaaaatcaactgcaccgatatttgatatttttctttgaaaaaggggaatgagcattcttccctttaaacttcaaaccttttgcaaagtggtgccacactgccactgtcaccaactttaaacccatttcaacaaatcctcaaactttacagtttatataatgttcccctggacccttcaaactctaatagtatcctttaacccattatctcaagtgtgcttagcatgttaccatttgatccatccatctaatgatatcttcaccatgtgtttttcatgtccccctatctcattcattgtcgtctaggtttaaataagttgcaatttgctcttcacctatcaaatttgaagcccttgtagtgtgagcctgttagcttggtaaacatgttagagagtctttttctaatagtgtcgataacagagaactttgtctccttttgatattgtttattttgatgtttgggttcgtatttgttttccctctatttttggatttagttattagataattttgattggtgttttatcaaaaatcatagtgtacttgtatcactctaatgaaagatccttttgaattatttgaagcctttcaaactttatgttcacaagacccaacatgggaaactaattcgaattctatgcattggcaatgtgaaagaatacatatatttttttttttttttgtatcgttcagcttctttaggacttcttatggccaatgttgttaatgggctgtcatggtggtttttgtgccagaagcctcatgcaatttattaagtgccacccactataggttgcaatcacacatttatattgaggaattttgggcatctgccacaaactgccttcagcctcttataccattgttattagcccagttgtccctacaccttgtcatctagatgacacaacttaaaccttatgtttcaaggctgatgcatcttttaacattttgggtcacattgttttcacagtatatttgattaattgcatgtccaattccattatataattaaatacaatattttcaaattattcaactgattggtatatttggtcaacttcaacgattaattgagaataattaaaagttgaaggtgtctttttgctaaatatacactgttcatattatatgattttattttatgtgaacaacccatattccatatgttttggttattagagttacataatagaccatttatcttcttttgattttaagactacaatgatctttttttccatctcctttcaatattgtaaggagctgaaaatgtattgtcatccagtaaatttgtattgagcctgtagtgttgaagttaatcaaattttgagatcattcttccgtagtgcctgttgaggcgcctgactttaatgccactcatgcaacaggcagagaagcaaaagaaaatccgagagttgactgccgagttagagaccacaaatcaaagatgtaatgtttatagggcaaacttgctggcggtgttaaaggacatggaagaacagaagttaaagctatcagtgaaggtccaaaatgcaagacttagtatgaaagagtgactacatcaattactgataggttttagactgtatctgtctagtttgatttatgtttgatttgtattagcttattatgttgataacctatgtgctatcttatgtatatggttagaggttaaatttaatcactgtgcttaatgcttattatgtatttattgatatgctataatttgattgaatatttaagtttcacgacaagttttcaattaaggacattgtattattgaattcacaaaaatgctgacaaccaatggaagagaaaattaagggtcatccttatacctgattttttgatgtattggtttgcgtcacttttaccgagagtataatatatatatttttttgcttagactagacatgatatttattgatgcaggatgtgaacaggtttttctgccatgtcatttggtgaagtctggagttgttctttgttatccaattcattgtctatatggccggttggtttggttaaaattgtccagattcagggtgtatatgactgagttgtcgaattgtacagattggctaatccggacaatctagactttaaaaaaactcaggtttttacacctttgaattggccaatccgaaagtgtaaaatgtttctaacaagaacaataatggcgatgtatagggggcacgagaaattttctttctgcgaggatgtaacttttctctgttattactgctgtttcacagcggcagcaaatcaaattagctgagcagctgcatgcatttgttctaaaattttgccggtttaatcgattataattctcaattctatctctgttatgtactcgaggtgcaatcgtatcgatacttcgtttagggtttttgataagatgttcgaagggatactgttttgtggaataccataatatctccttttgatgtgtggcagacatgttagggagagttgggagggtggttgaagcctatgagtttgtcaagggcttgggtgaagggaaaaaaaaatcagtagaagcatttaagttgtctataattccaaattctataaaattttcaatcatctcatccaaacacacatttacaaaaatgtgaaatgcaatgatgatctctaataaattgcaccatacatttggacaaaacaattactttataataaacatatgtgcatttgcaaactgcttttttcaccacaattttgtacattcattaactgtattttatatgaatttttattcatctaaatataattttctaacatttgataaatataattttctaacatttgataaatataattttctaaatggtatcctcatcctgaattctaattgataaagaggttatcttgtttttgtaccaaaaaaaaaaaaaaatattatattgtttatatttgttgtaagtgataacaccatacatgtgatgtattcattgttgattatgatagatattaaatttttttaatagaaagccattcatctttttcatattaagaaataatacgcaaacgtacaaattatgcatgataattacgctgatgaaatgtaaataactcactctttacatcgtcaggtgattattccaattttcttaaattttccttaaaaaaaagtaataattccaattatttatatggactacttgagaaacaactgttagttataatacaattatatgttgatataacatataattatgatcagaattttcaacattctttacttgagtttcggacaaacttctattcattctaaaacttttttgatattgaataaatacaatctataaccggtaatctcatcttatattttaataagatgagagattgatatgtttgtaattttcaaaaataacgtcactaagcatatgacacaatcaaagttgagtaaaatgaaatttatcgttttctattaggatgatcatgttatatctctattacctattttattaataaaagtaaaattttcaaatttattgaaagtgggttcatatagttatttttcatctctgaagaattatgggtcctatttcaacaaagttgaagttataacagaatatcctaggaaaggacacgtttaggctagtttagttttcttaatagattgatcagttagtagtcacaaagagaaagtttgattgagtaataaggttcataaatcctaacaattcaagagtcttacttccaagatgttggtgtttgcactggctcgaatatgataaaatagtggaatcattataaaaaaaaaatgttaacaaaaacaaagtaaatattctaagaatggatagattaattgacacgggtttgcttcaaaaggtttattaaatttatagattcaatggtgaagactaacttatagcaatttaacaggatatgatatgaggtagaaatcattcattctatgtaacaaggcattacttacaatcaatgctattttccatttctgttcattattcagtatgatttcatttgaagtaggtaaaatcaagttcaaaagtaaaaatatcttaccatagttcttcatatgaaatgaattaatttagctcgtgaaaaagtgatgctttacaagaacattgccatatttcttccaaaaaaataaaattcattgtcatattggtgcttatattcacgtattcaatgatgaatcacatttgatgcatacatatcaaagttactttggcaattttttattatttaatgtgtgtttggattgataatgaatttgacggaatcacattgacgattaaactattgtgattctaacaagagcttcaacaaaatcacagtgaaccaccttgagttcaccaatctcaccgccaatcaaaacctgcctcagacattttatccattttgatataaaccaaacttttaaacagccatgaaactgcaattcataaatttaaaaagggatatatacaatacatgaacacaaaacaaaggtactacaaacataaaataaaagtattccaggcataatgttataaatattgttttttagggtttcttcaaaaccaagggtcttttaaaatcgatatttctcttcaccaacgtaaaagcgtttgttgcgatgaatttaaaaaaattcttccctggttaggtccacattttcattaaggcctatttcgtctttataaggggtcttaattaggttgtggcgaataatcttagcatagttacttctgaagactttgaatcagtaatgcttctctttttcagaagaatatacttttccatattccttgcaccaactctcaaatagtggaggtgtgatctcatccatgtacttgaagccaacaatggaaatgcaatcaacgaaacacttatcttagtttgatatggatccctacatgactggaaaaagttctatttccagccagaaaaaaacaatgaagatatcaaagtagcgtctttcatacaatacatatacaatgtcgaacttatttgagagtgtcttataaaatcatgcaaaacacatatttgaatgaaatatacggacctgatagttataggtgacaccgcaaagagtgttattaacagatagcatccaaagttctttcatgatgttttcgggaactttacaaaggtatttgtatgttttatgtcattgtatttcgatgcgttcctaaaccatatacacaactaacaagtaataccttaattgcactagtgtttattacatgtttttctttcaaatatttatggagagggaggtgagtgggaaaaagttgatagagtgacaaagcaaggatcaaggatggtttgcaaaaggaaaagtgatcgagattgatgggtttgtaaactactttataacttaaatttaaggcaaattaaatggtatttggtgcgaaattatattcctccaaaaataacgaaggcaatttttttatttaatatcaccccatgatgtcacccacctccccatgaaaaatagcacttctggaaatttaaatatgttttttttagggagcttctacggtgcagtcaggaaactgacttttttgaaaaagttaattttgatcttaatgtttgattcatttttaaattgttgattactgattaatgatcaatagtaattcatctagtaatgcttgcaacatcttggacttacaggtactattttatcgttggaatctttaacatgcaaacagagttgatgatatagtcttaagtgttacactttgtggggtgttacacttaaaacaaggtaggataaaattagattaagtgtagtcttgttaatctgatgaattgatgatactatgaggactgaacttttgatgtcattgtacaaacagtgggtgttactcattacatttttgatgttatagtgttaacttcactcaaaaaagtcattctcatgacttcaccataaattttttttttttttggattctgatgaatgaattgaataattatcacaattttttatcagaaaaatttactatggagtggtagttctcatgaaagtaagtgattaggttattcacaaaaaaaaagttactaagttaggttcgttcatccttaaaatagtcactagatctttatatagtttttgcaatattttctggttagtctatgtgtattttgcaaactctttttttgggttaagatctcttctccatttcttcaatttggagagataaagacacataaaatcttgaaaaaaattaatgatggtgggacccacttagtggtaggacccaccatctattttttgtgtctatctctctccaacttgcaaaactccatttattttgccaaatggagaggatcttcacttttttttaccacaacttttgacattcattaactgtattttagatgaatttttctattcatacgacaacttttctcatacgataattttctaaatgacaacctcatcatcttgaattataattaagagagatattgtcttgtttgtatttattgtaggtgatgtcaccatacatgtgataaaagtagacattaactctcatgagatgcaaataatttactatttagtttgttagataataattcaaattatctatatggactacttgagatgcatctgctagttttgtcataaagctatatattttgataaaacgtatgatctataatcacaatttttaacatttctgagttctttattcattctaaaaacttctctgatacggaataaatatagtatataactgataatctcatcttatattttaatatggagagattgaagtgtctgtaattctcaaaaataacgtcaccgtgcatgtgacacaaccaagactgaacaagatgaaatttgtccttttttattaggatgatctccgttatatctctctattacctatttaatttttcaaaaaagtaaaattttcaaatttagtaaatgtgacctcacacttatttttcatctttaaagaattgtaggtccaacttctcaagatcctaggaaagcacacatgtttaggctaggctagttttagtttgcttaatagattgctagttagtcacaaaaagaaagtttgattgggtaatgactaatgaatacaattggtagttacaaatgattttctatcaaaacttttcacaggcagttgaagttttcaactttccttgtaataaacatgcatattttaaaacatcaaaagagtgaaaccagaaaaacgtggaaacaaaagcagaaaaagatgaagaagaggaaaataaaatgcctttgtgataattgatgaagatcagaggaattgaacaagaaatgtgaggattttattaaaaagatgaaagccgcagcattctgttctgagaaaagatcttactatgacaattgttattttgattattctcagaaatctctttggttgctgattaattatgttgcaatggagtgtaattaaataatcctcttcctctaccaaaataaaaataaaaataatcctcttccttaaacttatctttaatttagccacaaaggtttttgcttgctggaattaaatcattctctacattttgtgttacagtatactacctcatttcaaaatgaaacaaattaatatatttcaacctcaagcccgcaacaccatgcatctgatgcattgttggtttcgatcttgtataacccctcacgattttgtcctttgagtaaaaatcaattctataatcaaaagctacaatttctatcttcaaataacaacaattctaaaagtaaaatcaattctactcgaaaacaaccaaacatgtatgatagggttacaacacttggactaaaatcaagaggagggggggggggggtagagttttcttctccctctcattgtttgctcaataagaaatattatcaagtatattattgtttatgtttgatagcttctacttccaagctattatgcttctatttgcaaatttctccttcactagcctaattttgtattgactcctctctccaaggttgtttttattcttctgtaaatcatactttttgtgttttcaaatgaactagatggaaagaatctgtgtgagaaaactatataactctattcaacagtattatttttctattacattaaaatgttacaattacaatcagatgcaatctacttttaatttatcagttcaataatagcaaaaatgtgaatgactgccatgtaattttgatccacattcatatagtttttatgaatttgactttactaaactgaatagtgtatttcagttaaagtgcagaactatatcagttacctgtcaaaacacaattgtaaacttttggacaaaactttctaaaacgcatttcctcatttcaacgaagtgaaatcaagttgagttgatttatgtagtaatttgactaataccctccaaccattttgtatgtggtcagtaacataatttcatacatgattcataatataatcaatcaaactacctaaataagtgtaggaagatccaccctctaacaaagtcttcttactcttttcactcatctctttcactttcttccttacctctccatccttatccaacacactccttattcctctctcaatcttgtctgaagctaaaagataatcacgcccaacatcgtactccatcctataatccactgcaatctccacacccatcttcagctcagacacaagttgaaaagcattggtttgttgatcagcaaagagtggccatgtggcaataggcacaccaaaatatatgctctcgagtgttgaattccaaccacaatgtgaaacaaatcctcctgtggctggatgagctagtatttgggcctgaggagcccatccaatgacccttccagtcctagctgttcgatctaagaacccttcaggtaaaactgcgaccaaatcagaaagagagtaatcagatgtctcacccatggttcccttcggtgggggttttcgcagagaccacaggaagcgagcctcacttttctcaatagcatacgcaatctccctaatttgatcctcatcgaaagaacccttgctcccaaagcaaagataaactacggacgaaagaggttggtcatcgagccaattaacaatgtcatcagaatcaacaataccattaggctcgggtttggtctcaaggtttaatactggtcccactggataaatgggaaaactacgtagacccggatcttctaagaatgagtgaactgcatgagattctagctcctgaaacgaatttactatgaccccacttgctttcttgagtcctctgacatagttaatgaaagatgattcccactccttgcgcaacactacagtgggaagcgtgtttgtaggaaccgggttagcgaaacaagggatgtccaattcatcctgttgaaacagcaatcgagtggcttcgatgttgtcttcaaaaagtgtgtgaaaatgaagcatcaaaccaaggaaagcaacaccggaagtgaagtagacgagggaagggacaccaaagtcattagctacatcaatcatggtggtgcagaacatgtcaacaacgaaggcagcgagctttccagtgatatttgaaacagcttctttaacattggccttttgggtttcaacaagagcagctacagagctacctacgttggaggtggagggaacatgagtggtttcagggaggttaatgacatggagattttctgagtcagaggaggaaagggtttctgcaggactgtttggaaacttgatgaccaagatggttattcggagacggttatcacggttgattagaagcttcgcaaactcaagggtggaaactaaatgtccaacaccaggagaagggataaacaccacttctagtttcttcatcctaaacaacaactaaaaaaaactattttcgatcaacaagaagcacaaagtatatatcagtatagatagaaatccatacttgcgaatgatgtcatggctttgctggtgtgaaatgaatgtggtgaggaggagatttaaatgctgttgactatgtgcacaaatgttgttgtctttattaaagacaataatggattatagttgaggacagttaaattggatttttactgtatatttgtacattcgtattactaatactggtataaaacgtggatcctgaaattttgtgtggtgagcaatggttcggaaacctgaatcattatcttgtctagttggttcatataatagaacgtggtcagtgagggacaggactgagcaacacataattgatggtagaaacacagtctgtcttcttttttttttgacggatcacataagatcacttgaagggtctatttcagagttgattagagggaatgaaaaacatggtagagaagatagtttgcaaagcacaaattgtgatgaagttttagaaaagttttcatttttttcttccctacaaaccttatcttttaaatgacacttatagtttccggtatcaaattaagatcttattacctttgtatagttttctattattacacagaataatatcgttctaaaaactaaaaattgccacttctacaaaaaatgatatttattttgaattgtattaaacaaatcgtcattttagaatgatgtatcatataaattaaaattaatcagcaccaatgaaattcaatctcaaagcattgtacaaaatgaaagtattcctgatcttcaagcaaatagatcaacacaaataataataatcaggtcacacatgtatagaagcttgaaatagccatccatagaattgcaacgcatatcaagatgaattgcaacacatgtatacaccagaaatgttgtctttcttttctattttacaaattcaacttaacaacaataaacatggagcatagaaataaactaagttcacacttcaatcgtaccaaacatttctccattcctcaaaatgccaacaattacaacagcggatatctttacttgatggccagtacaaatatataatagcaattgcaacactggatctccttatttagtagcttgtgcgataatattactcaaggaactggcttcctccttagcagtctccaccaatgaatcctgaaagacgatgtcatacaaatttggattagaaaaactgattgaagaatcaaaacatacccaaaaaagaaagaccattgatacctgtgcagctatcaaccgagcaacagtttttttgctcgactcctgaagctcgccggcaattagaatttcatcaagtatataataggccttccatgattaaaaacaaagaacaggtcagaagggagattactagaccaataataatgacaggcgatgtggtcaataattgaggctcattcagtgtggatccaccatgaaaggattaataggagttacagggaattaagtaggccttattttgaattatggatatatatcgcattaaacttggacataccttatggaagttgaatatcaagtccagttcacagacctgcaaattgacaagtcaccattatcaagttagagtgacacgagaaatgattcttatattatatccttaagaaaagggactcttcaaaagtcaaaacttttgatagaacttacactgccaaaataccgatcaagaatctccacaaaatgatgaatcatttcaagtacttccaattcgttgtcagcatcatcaatacacatacagaaatatagactagcatatctgtagcagatattcattataacatggtcaattaaaaatcaagccaaacagaagatcgccttgcaaaagagtataaagctgtctactctagtcaaaatagataccttttataaacaactttatgtcctctccactctacaaaattacagagcttgggagcacggctaagaatcactccactgagctcacggattaccttgtcaacaaaaatatgagatgtaaatacacatatcaaggatgtttatcatgcaatgtggtgtgctcagcatgcaatgaccatcactatcaccataataatacatacaaataaaaacatatatccataataaagagaacatgcgataggttgttagttaccttacttctttccttctgagtgtaaggtgaataccattttgtgagcctaaccttcccttgacgactaatgagaagcacaaagtgtatctacatttaggaagaggaataaagcatgcaagttgaaattagagatcctattaacaacggggagagagatacaattctaccattcatttaaaagtacctagactttcagaattcaatcatataatgaataagcattcatacatatatgtattccaagtacaaaatacaaggtgaaaatcactttcaggtaacttcatgattggtagtaacagaaacccagaacacgaaagaatgctgttatgttaagaggagtttcatcatggaaaaatttagagcaatgatatttagccacaaaaagttgacaccgtataaaaatacattcaatttaagtgttcaagtaattgaaagtgagagaagaaattaataaaagaatgaaaagcttatagtatccagtgtccatgtcaaacttagtgtcaaaataacatttttcaaaaatttaaatacaaggaagctatgaatcacgactaactaactaaggctctgtttagcaaaaaatagacgatagttgatgaacttatagggaatagcttatagcggataagctagctgattgaatttgtagtgtttggtaaaattagtggttgaactagcttataaatatgaaatgacataaaaaagatatatttaatttttttcaactaagatgagagggattaaatcgagaggaaacatgataagttataaattttaagctatgagttaattgaaccagcttatcaaaataatttttaaagcagtaaaaataagttataagcttgcgagtaaaaaatagttacagaaagtgtctttcttttttttgtcatatgaagttcaaaatctgtcaatgccaaacagaacctaagacttgatcgcatcaccaaaactaacatgtgtttaacacagtgacgcatcttcaatcagaagcgatcgcatcaggaaaagtatgaacaagtaactaatcataatagatctagaaattaacaacaacctataacagcatgcatattcagatcgagtttacgaaagtaatatcacaaaatgaaatcactaagaaattcaaattcagtgaaaataacgaaagtagaagaataaaggttgagtaactgaccattgattttgattttggcgaaagagatctaaattcactcgattcgattctgaatgttttttgttgaattgaattgttacgatttacgaatgagaatgagaatttagttgaaatcagaagagaagatgaagagcttggtctgtcagtttctttctggactcactgtggtcgactatatctttttccggaaatgttaaatgcaccctccctttttcattttcacaccccctccaaagtatacatacccctatctctataaatattcatcttaatcttttttcatttcaaaagtttattttatatatcctaaaaaaaacaaatttcatttatagaaaaacatatatttctttagggtttgtttgtttcaaaagaaagaaagtggaaagatagtaaggaggatgaaaagtttcttgaaaagtgtgcttcctctgattagaaccctatcagagaggaaagaaaggttgcttttttatgggattcaagtaatacatttttttgttatggacatcatgaaaggagagatttgtccttttaattttctatcttaaccattaagtaatacgtttttttgtttgttatggaaatcataaaaggagagattagtccttttaaaaaaaaatcagaaaataagtccttctaaaaaaatgatacctatttttttggattcacacaagtttgtttccttttttttttctttcatcccaattaattatgtgtcttgccaattaaaagtaagaacacaaattcgtccctcaattatgcgaaatatcaatttaatccctgaatttgttaaatgtcaatcaagttagtccttctgttcaaacggagcgttaacggggctgacgtggccgttaacctctcacatgtcagacgccacgtaggcagggactaatttggccgataataacaaacatttcgaaggactaaattgattgatttgcagaaaatgttttggctttcttcccaaacggctcttttcttccccaacgactctttcttccccaattgtataaaattggaaccctaattacacaatctgcaatctacaccccaattcaaaaaacttcaaaccctaattttttcgtattgaatttgaaagccaaaatcctcaaaatttcttgaagcaaaactattgaaattgaatctgaaatgatggggggtgggaatatgggaaaaaacagttatgaaagtcgagcttcatcttcaagctccaagtttaatggtgatgtgagagtgcttgaatgttggtgtcctagaatttgtgttgttagaaaatccaatactgtaaaaa

SEQ ID NO: 526 - DNA, 21 bp, Artificial Sequence
  Synthetic Construct
gacatctttcgttggtggcaa

SEQ ID NO: 527 - DNA, 20 bp, Artificial Sequence
  Synthetic Construct
tcgatgtttttcgggggtgt

SEQ ID NO: 528 - DNA, 52 bp, Artificial Sequence
  Synthetic Construct
ggggacagctttcttgtacaaagtggaaatggaatatggtggtgggttagtg

SEQ ID NO: 529 - DNA, 57 bp, Artificial Sequence
  Synthetic Construct
ggggacaactttgtataataaagttgcgaacaaaatagtttatgtaatcacaaagac

SEQ ID NO: 530 - DNA, 24 bp, Artificial Sequence
  Synthetic Construct
caccgtggtacccactcaatggta

SEQ ID NO: 531 - DNA, 24 bp, Artificial Sequence
  Synthetic Construct
cacctactctattagtgctacctt

SEQ ID NO: 532 - DNA, 28 bp, Artificial Sequence
  Synthetic Construct
ccttataattaaagttgtttctcagatc

SEQ ID NO: 533 - DNA, 46 bp, Artificial Sequence
  Synthetic Construct
ggggacaactttgtatagaaaagttggtcatggcttgtccaacaac

SEQ ID NO: 534 - DNA, 48 bp, Artificial Sequence
  Synthetic Construct
ggggactgcttttttgtacaaacttgctttcccgcatgatactcaacg

SEQ ID NO: 535 - DNA, 47 bp, Artificial Sequence
  Synthetic Construct
ggggacaactttgtatagaaaagttggcaacaacgcacaactcgtac

SEQ ID NO: 536 - DNA, 48 bp, Artificial Sequence
  Synthetic Construct
ggggactgcttttttgtacaaacttggttgctaacgagtgccttcatg

SEQ ID NO: 537 - DNA, 30 bp, Artificial Sequence
  Synthetic Construct
caatcagtgttaacgttctattatactata

SEQ ID NO: 538 - DNA, 30 bp, Artificial Sequence
  Synthetic Construct
tatagtataatagaacgttaacactgattg

SEQ ID NO: 539 - DNA, 30 bp, Artificial Sequence
  Synthetic Construct
gtctcaagagcagtggatctgcttaagtaa

SEQ ID NO: 540 - DNA, 30 bp, Artificial Sequence
  Synthetic Construct
ttacttaagcagatccactgctcttgagac

SEQ ID NO: 541 - DNA, 30 bp, Artificial Sequence
  Synthetic Construct
ttttagttataataggaacatgtctgatca

SEQ ID NO: 542 - DNA, 30 bp, Artificial Sequence
  Synthetic Construct
tgatcagacatgttcctattataactaaaa

SEQ ID NO: 543 - DNA, 30 bp, Artificial Sequence
  Synthetic Construct
gggccatctctctgcttctacaaattttct

SEQ ID NO: 544 - DNA, 30 bp, Artificial Sequence
  Synthetic Construct
agaaaatttgtagaagcagagagatggccc

SEQ ID NO: 545 - DNA, 24 bp, Artificial Sequence
  Synthetic Construct
attgcaaggcgatttaacctaaca

SEQ ID NO: 546 - DNA, 24 bp, Artificial Sequence
  Synthetic Construct
gagaggggaagcttgaaaaagaga

SEQ ID NO: 547 - DNA, 20 bp, Artificial Sequence
  Synthetic Construct
tatggaggagactcttgtgg

SEQ ID NO: 548 - DNA, 20 bp, Artificial Sequence
  Synthetic Construct
ggttgcttgatgatttggtg

SEQ ID NO: 549 - DNA, 26 bp, Artificial Sequence
  Synthetic Construct
tggcatcactcagtacctttcaacag

SEQ ID NO: 550 - DNA, 28 bp, Artificial Sequence
  Synthetic Construct
acccaaagcatcaaataataagtcaacc

SEQ ID NO: 551 - DNA, 11 bp, Medicago truncatula
ataagatacgg

SEQ ID NO: 552 - DNA, 11 bp, Trifolium pratense
ataagatatgg

SEQ ID NO: 553 - DNA, 11 bp, Glycine max
aaaagatacag

SEQ ID NO: 554 - DNA, 11 bp, Cajanus cajan
aaaagatatga

SEQ ID NO: 555 - DNA, 11 bp, Lupinus angustifolius
gtaagatatgg

SEQ ID NO: 556 - DNA, 11 bp, Arachis duranensis
attagatggat

SEQ ID NO: 557 - DNA, 11 bp, Medicago truncatula
ttaagatttcc

SEQ ID NO: 558 - DNA, 11 bp, Cicer arietinum
tttagatttcc

SEQ ID NO: 559 - DNA, 11 bp, Lotus japonicus
tttggatttcc

SEQ ID NO: 560 - DNA, 11 bp, Glycine max
tttggattttc

SEQ ID NO: 561 - DNA, 11 bp, Lupinus angustifolius
ttcggatttcc

SEQ ID NO: 562 - DNA, 11 bp, Arachis duranensis
tctagatttcc

SEQ ID NO: 563 - DNA, 11 bp, Medicago truncatula
catagatacag

SEQ ID NO: 564 - DNA, 11 bp, Cajanus cajan
catagatacac

SEQ ID NO: 565 - DNA, 11 bp, Lupinus angustifolius
cattcatacag

SEQ ID NO: 566 - DNA, 11 bp, Arachis duranensis
tagagattcag

SEQ ID NO: 567 - DNA, 11 bp, Medicago truncatula
ttttgattctc

SEQ ID NO: 568 - DNA, 11 bp, Lotus japonicus
tattgattctc

SEQ ID NO: 569 - DNA, 11 bp, Glycine max
gtttgattctc

SEQ ID NO: 570 - DNA, 11 bp, Cajanus cajan
tacagattctc

SEQ ID NO: 571 - DNA, 11 bp, Arachis duranensis
ttttgattaga

SEQ ID NO: 572 - DNA, 11 bp, Medicago truncatula
atgagataggc

SEQ ID NO: 573 - DNA, 11 bp, Lotus japonicus
atgagatagac

SEQ ID NO: 574 - DNA, 11 bp, Glycine max
gcaagataggc

SEQ ID NO: 575 - DNA, 11 bp, Lupinus angustifolius
atgagatatga

SEQ ID NO: 576 - DNA, 11 bp, Medicago truncatula
agcagatccgt

SEQ ID NO: 577 - DNA, 11 bp, Trifolium pratense
agcaaatccta

SEQ ID NO: 578 - DNA, 11 bp, Cicer arietinum
agaagatcctg

SEQ ID NO: 579 - DNA, 11 bp, Lotus japonicus
agcagatctcg

SEQ ID NO: 580 - DNA, 11 bp, Glycine max
atcagatcctg

SEQ ID NO: 581 - DNA, 11 bp, Lupinus angustifolius
aacatatcttg

SEQ ID NO: 582 - DNA, 11 bp, Arachis duranensis
aggagatcctg

SEQ ID NO: 583 - DNA, 11 bp, Medicago truncatula
cactgattgcc

SEQ ID NO: 584 - DNA, 11 bp, Lotus japonicus
cattgatcgcc

SEQ ID NO: 585 - DNA, 11 bp, Glycine max
cactaactgcc

SEQ ID NO: 586 - DNA, 11 bp, Cajanus cajan
tatcaattgcc

SEQ ID NO: 587 - DNA, 11 bp, Lupinus angustifolius
cactgattgca

SEQ ID NO: 588 - DNA, 11 bp, Arachis duranensis
tcctgattgcc

SEQ ID NO: 589 - DNA, 11 bp, Medicago truncatula
tatagatttga

SEQ ID NO: 590 - DNA, 11 bp, Trifolium pratense
tatagatatga

SEQ ID NO: 591 - DNA, 11 bp, Lotus japonicus
gatagatttga

SEQ ID NO: 592 - DNA, 11 bp, Cajanus cajan
tagagatttga

SEQ ID NO: 593 - DNA, 11 bp, Lupinus angustifolius
cacagatttga

SEQ ID NO: 594 - DNA, 11 bp, Trifolium pratense
tatagatttga

SEQ ID NO: 595 - DNA, 11 bp, Cicer arietinum
tatagatatga

SEQ ID NO: 596 - DNA, 11 bp, Glycine max
gatagatttga

SEQ ID NO: 597 - DNA, 11 bp, Lupinus angustifolius
tagagatttga

SEQ ID NO: 598 - DNA, 11 bp, Arachis duranensis
cacagatttga

SEQ ID NO: 599 - DNA, 11 bp, Lupinus angustifolius
tctagatccta

SEQ ID NO: 600 - DNA, 11 bp, Glycine max
tgtggatcctc

SEQ ID NO: 601 - DNA, 11 bp, Arachis duranensis
tttagatccta

SEQ ID NO: 602 - DNA, 11 bp, Trifolium pratense
taaagattagg

SEQ ID NO: 603 - DNA, 11 bp, Cicer arietinum
tatagattagg

SEQ ID NO: 604 - DNA, 11 bp, Lotus japonicus
tctagattagg

SEQ ID NO: 605 - DNA, 11 bp, Medicago truncatula
ttaggattaag

SEQ ID NO: 606 - DNA, 11 bp, Medicago truncatula
ttaagatatga

SEQ ID NO: 607 - DNA, 11 bp, Cajanus cajan
tcttgatttga

SEQ ID NO: 608 - DNA, 11 bp, Glycine max
gactgatttaa

SEQ ID NO: 609 - DNA, 11 bp, Medicago truncatula
ttgggatttcc

SEQ ID NO: 610 - DNA, 11 bp, Cicer arietinum
ttgggatttca

SEQ ID NO: 611 - DNA, 11 bp, Lupinus angustifolius
ctgggatttca

SEQ ID NO: 612 - DNA, 11 bp, Arachis duranensis
ctccgatccca

SEQ ID NO: 613 - DNA, 5 bp, Artificial Sequence
  Synthetic Construct
  misc_feature 1: n = A or G
  misc_feature 5: n = A,T, or C
ngatn

SEQ ID NO: 614 - DNA, 5 bp, Artificial Sequence
  Synthetic Construct
  misc_feature 1: n = A,T, or G
  misc_feature 5: n = T or C
natcn

SEQ ID NO: 615 - DNA, 11 bp, Artificial Sequence
  Synthetic Construct
caaagatcttt

SEQ ID NO: 616 - DNA, 11 bp, Artificial Sequence
  Synthetic Construct
gagagatcttt

SEQ ID NO: 617 - DNA, 11 bp, Artificial Sequence
  Synthetic Construct
caaagatcttt

SEQ ID NO: 618 - DNA, 11 bp, Artificial Sequence
  Synthetic Construct
aaaagattttg

SEQ ID NO: 619 - DNA, 11 bp, Artificial Sequence
  Synthetic Construct
aaaagatttat

SEQ ID NO: 620 - DNA, 11 bp, Artificial Sequence
  Synthetic Construct
caaagattttt

SEQ ID NO: 621 - DNA, 11 bp, Artificial Sequence
  Synthetic Construct
caaagattttg

SEQ ID NO: 622 - DNA, 11 bp, Artificial Sequence
  Synthetic Construct
taaagattttg

SEQ ID NO: 623 - DNA, 11 bp, Artificial Sequence
  Synthetic Construct
taaagattttg

SEQ ID NO: 624 - DNA, 11 bp, Artificial Sequence
  Synthetic Construct
aaaggattttg

SEQ ID NO: 625 - DNA, 11 bp, Artificial Sequence
  Synthetic Construct
gttggattttg

SEQ ID NO: 626 - DNA, 11 bp, Artificial Sequence
  Synthetic Construct
atgggatcttg

SEQ ID NO: 627 - DNA, 26 bp, Artificial Sequence
  Synthetic Construct
ggggacaactttgtatagaaaagttg

SEQ ID NO: 628 - DNA, 26 bp, Artificial Sequence
  Synthetic Construct
ggggactgcttttttgtacaaacttg

SEQ ID NO: 629 - DNA, 28 bp, Artificial Sequence
  Synthetic Construct
ggggacagctttcttgtacaaagtggaa

SEQ ID NO: 630 - DNA, 27 bp, Artificial Sequence
  Synthetic Construct
ggggacaactttgtataataaagttgc

SEQ ID NO: 631 - DNA, 7 bp, Artificial Sequence
  Synthetic Construct
tgccggc

SEQ ID NO: 632 - DNA, 15 bp, Artificial Sequence
  Synthetic Construct
cttacactaacggtg

SEQ ID NO: 633 - DNA, 15 bp, Artificial Sequence
  Synthetic Construct
aattcctcgtaagac

SEQ ID NO: 634 - DNA, 13 bp, Artificial Sequence
  Synthetic Construct
tgaagaacctttt

SEQ ID NO: 635 - DNA, 15 bp, Artificial Sequence
  Synthetic Construct
gtctcgaatattttt

SEQ ID NO: 636 - DNA, 14 bp, Artificial Sequence
  Synthetic Construct
taccaaccaagaac

SEQ ID NO: 637 - protein, 621 aa, Amborella trichopoda
MQEAVNPQESLFGSLSEAMDFDFIDEALDGGSWLDAVDCSDLSQPGPSTSSSLLDPSYFVSPVYINTQNPQNTDQDYQEQAVIFENPMENPSENLETQSMNHNSISKLGFPDSQWPPNSTTGSIMKRWVNPNLVSPVNDRLMQAIQIIKESTSNGDVLVQIWVPVKKGDSHVLTTCEQPFILDPRSQTLTRYRTVSMNYFFSAGEGSGGVLGLPGSNEYPRVNYAQEFDVRGTLALPVFEKGSRACLGVVEVIMTDQKINYAPELDKICRALQAVDLRSSEVLTPPYVKVRNDGFQSAFPEILDVLKAVCETHRLPLAQTWVPCIQHGKKGSRHTDESYKDCVSTADGACYVRDSEMTGFQEACSEHHLFKGQGVAGKAFATNQPCFSPDVTSFSKMDFPLVHYARVFGLGAAVAIRLKSTYTGAADYVMEFFLPVDCRDNEEQKMMLNSLSVTIQQVCRSLRVVTDKELEDEMMTQVNDVFCSDKMASKSRKADVENPSGDLNKSSSGVGASWREKTGVFLSSMPSGFQEGRDIMVAQSCHWGSPRVSCHEGGRFFKVEQHQDSANNSADRGQSFVGELDFSNAGKGPEKRRAKTEKNISLQVLRQYFAGSLKDAAKSIG

SEQ ID NO: 638 - protein, 910 aa, Amborella trichopoda
MASSSLLCSGGEAAETMAESCNFFEFMDSIGGYYSLDLDASDFQASFPTFTPQSSNYQVFSLFSLPQSSNLEEEILDKWVSSDSSQLFDSGFSPIDISEPGENIIQGPGLMKVHAISGKPIENLRQNKANEIDVKLENRGEKPFFDSNESCVLKERMMLAIRNFKDSAEHNVLVQVWVPIKNGDKFVLTTSGQPFALDHQSTSLLRYRTVSLTYAFSTDKEDEGNLGLPGRVFQKKRPEWTPNVQFYSRKEYPRLNHALLYDVRGSLAVPIFEASGESCIGVVELITTLQKISYAPEVDKVCKALEAVNFKVPEIVDHPNVQISNDGHRAALAEIRKILISVCDIHNIPLAQTWVPCYYCDVKNYVAVMKDNDSCLKIGDRKVCMSANNAAFCVNEAHVWGFRDACSEHHLKGSEGIVGGAFTSKGPCFCDNICSFSKTEYPLVHYAYMFGLSGSLALHLQSLYAGSGDYVLEIFLPLNCKGKAEQRKLLVSMLATIKQCCQNSFLVLSKEVHDEKSVQMIEICRNVENGGNIPGSHKNCQGHHEMYQEQERSCKSTLHETSGHRDLLRQDTMNYNVKLSDIEAKRCEVNSVGEIKFGRRGLERGRGKLEKSVSMVVLQQYFAGSLKDAAKSVGVCPTTLKRICRQHGIRRWPSRKINKVNNSLRKLQGEIESVRGIDGPFTVTSFTNSSISWPAPSDHKTFTTTHCTRPIAMEAKCLDSDSEPIIDKLSKYNCYFSDAIPGQRDIIAPRDESMERPMTSEFCLSSFSPQSSDPSFALEYKKRFCTERPKSEHMQIARSVSCKDLSELPHGLEWVTIKTSYQDDMVIRFRLSSGSGIFDLHREVSKRFKMEVGAFGIKYFDNDKGNWVLLSCDADLHKCIDASTSSGARVIRLSMTFSNQATRMREAQLI

SEQ ID NO: 639 - protein, 993 aa, Amborella trichopoda
MDLDLDMDGAWVNESTNEDVASGYAFSPNCQELSFCSLSPSHNIPDFSQFPTQPDKTTETQVTQQFEASSSLPKTMYNPESYSPMWLFSDNSFPLKISENDPQITIPGNIDPESGLKQEKSIDLTNCDGSNGLPGPNHMMGLSEKNQTGGFIVISESNSNEKSDKASNNQNWVVDERSESDGSCVLKARMMQALRYFKESTEQHVLVQVWAPVKNGDKYVLTTSGQPFVLDPHSNGLLQYRTVSLMYVFSTDPEKDSDLGLPGRVFRKKLPEWTPNVQYYSSNEYARLTHAMHYNVRGTLALPVFEPLGQSCVGVVELIMTAQKINYAPEVDKVCKALEAVNLKSSEILDHPNLQICNEGRQAALAEILEIVTVVCETHSLPLAQTWVPCRHRSVLAHGGGSRKSCTSFDGSCMGQVCMSTTDVAFYVVDAHMWGFRDACSEHHLQKGQGVTGRAFESHRPRFSRDITQFSKTEYPLVHYARMFGLAGALAICLRSTHTGSDDYILEFFLPPNCKDTTEQQRLLDSLATTIQGCRRSLRVVSDQELMEENVLEIIEGSMNGGGDMMIEGETGQNCANVHITQESGEPHENDELQLLEQQRPSEVEVHKDDGKLINTEQEHAAAPLSKGKNVKKGLERRRGKAEKTISLEVLKQYFAGSLKDSAKSIGVCPTTLKRICRQHGISRWPSRKINKVNRSLSKLQRVIESVHGAEGAFNLPVALGPIPLSTDLKASKEHSHHSVEKERETPPSKTLEEEHPNSQVEPLIRIESDVHQQLGDVGYTVHESKSKSDVGDEATEAPTSQGSCLSSPTSETQLNNLHTSLIHEIESFDGFRPIVDAGSCKDLSSLCNMGTEDIPEEQLPEPNGVQEPLPLSLEPHPPFQPAIVSPFVQETQADIKSVAVKASYKEDIIRFRLRFTSGVVELNEEVAKRLKLEMGTFDIKYLDDDQEWVLLACDADLQECIDILMASMGHVIRLLVHDVVSNLGSSCESSGE

SEQ ID NO: 640 - protein, 1025 aa, Amborella trichopoda
MDHLFVHRAPGTGPWCSSQGVPSVPDNMGVEDSFSFSEIMDFDSYVEPSVAGDQVSPVYGFNNSYPIGDVPTYYAPVSSNPNSNPATGNSLVGFGVPLEYRDPVTNPTASFYPRPFSPEEEVIAGAPYFKTNTKSDAYDRKNTYQYVYKSPVDPTKASCYRPSVRQEGDNGSNCGSFVGQSEHEEILKRNINTKEWMVKQMDSRQNFTIPRSPGLILSEKLLKALSLFRGYCGGNILAQVWMPVRQGDQYVLTTCEQPYLLDQILAGYREVSRGFFFSAKGTEGAFPGLPGRVFISGLPEWTPDVSYYKRAEYLRADHARRNEVHGSLALPVFEPHDSSCLAVLELVTTKKKASFGEEMENICHALQAVNLRSREAKVHFQIISENRKAALAEILDLLRAVCHAHKLPLAQTWTPCKQKFMPRLEDGETLEKVLLSIEKSACYANDPQLDGFMDACAENHLEKGRGIVGKALQSNKPFFSKDVKEYDILEYPLAHHARRFALCAAVAIRLRSSHTSDDDYVLEFFLPLNCTGSLEQQLVLNNLSSTIQRICRSLRTVSEAELAECNTVGVFGKDERKSSSLMGMHGKCSDPPLSKAMGIQNPVLDKVEGDVDHEQTTTDSKRQFERKRNTAERNISLSVLQQYFSGSLKDAAKSIGVCPTTLKRICRQHGISRWPSRKINKVNRSLRKLQIVIDSVQGAEGSLKFDVLTGGFVTGASKLHDGDNQIPFSTSPKSSPIVLLNVTPKKKVREEAASSIEEIRKSEINFQSLHSNKTELSGTPSLPMAFKIEKDPVSVSPIGVIDEPKAATSFCSGLEQMPWAFSQTNLRSSFVGRETCERMDTNKDHMSIESSECLIRTRSSSSLAAVDELENGVYAMDGMVENNQPSSSGMTDSSNSSGSMINGSATSSPTMPVSCKSKVYLRDGSSRVTVKATYKDDVVRFKFLPCLGYFQLFEEVGRRFKLSIGTFQLKYLDDEEEWVLLMNDSDLNECLEILESYGAHSVKLMVRDLPCVMGSSEGSTCAPLG

SEQ ID NO: 641 - protein, 840 aa, Amborella trichopoda
MASSSLLCSGGEAAETMAESCNFFEFMDSIGENIIQGPGLMKVHAISGKPIENLRQNKANEIDVKLENRGEKPFFDSNESCVLKERMMLAIRNFKDSAEHNVLVQVWVPIKNGDKFVLTTSGQPFALDHQSTSLLRYRTVSLTYAFSTDKEDEGNLGLPGRVFQKKRPEWTPNVQFYSRKEYPRLNHALLYDVRGSLAVPIFEASGESCIGVVELITTLQKISYAPEVDKVCKALEAVNFKVPEIVDHPNVQISNDGHRAALAEIRKILISVCDIHNIPLAQTWVPCYYCDVKNYVAVMKDNDSCLKIGDRKVCMSANNAAFCVNEAHVWGFRDACSEHHLKGSEGIVGGAFTSKGPCFCDNICSFSKTEYPLVHYAYMFGLSGSLALHLQSLYAGSGDYVLEIFLPLNCKGKAEQRKLLVSMLATIKQCCQNSFLVLSKEVHDEKSVQMIEICRNVENGGNIPGSHKNCQGHHEMYQEQERSCKSTLHETSGHRDLLRQDTMNYNVKLSDIEAKRCEVNSVGEIKFGRRGLERGRGKLEKSVSMVVLQQYFAGSLKDAAKSVGVCPTTLKRICRQHGIRRWPSRKINKVNNSLRKLQGEIESVRGIDGPFTVTSFTNSSISWPAPSDHKTFTTTHCTRPIAMEAKCLDSDSEPIIDKLSKYNCYFSDAIPGQRDIIAPRDESMERPMTSEFCLSSFSPQSSDPSFALEYKKRFCTERPKSEHMQIARSVSCKDLSELPHGLEWVTIKTSYQDDMVIRFRLSSGSGIFDLHREVSKRFKMEVGAFGIKYFDNDKGNWVLLSCDADLHKCIDASTSSGARVIRLSMTFSNQATRMREAQLI

SEQ ID NO: 642 - protein, 800 aa, Amborella trichopoda
MKVHAISGKPIENLRQNKANEIDVKLENRGEKPFFDSNESCVLKERMMLAIRNFKDSAEHNVLVQVWVPIKNGDKFVLTTSGQPFALDHQSTSLLRYRTVSLTYAFSTDKEDEGNLGLPGRVFQKKRPEWTPNVQFYSRKEYPRLNHALLYDVRGSLAVPIFEASGESCIGVVELITTLQKISYAPEVDKVCKALEAVNFKVPEIVDHPNVQISNDGHRAALAEIRKILISVCDIHNIPLAQTWVPCYYCDVKNYVAVMKDNDSCLKIGDRKVCMSANNAAFCVNEAHVWGFRDACSEHHLKGSEGIVGGAFTSKGPCFCDNICSFSKTEYPLVHYAYMFGLSGSLALHLQSLYAGSGDYVLEIFLPLNCKGKAEQRKLLVSMLATIKQCCQNSFLVLSKEVHDEKSVQMIEICRNVENGGNIPGSHKNCQGHHEMYQEQERSCKSTLHETSGHRDLLRQDTMNYNVKLSDIEAKRCEVNSVGEIKFGRRGLERGRGKLEKSVSMVVLQQYFAGSLKDAAKSVGVCPTTLKRICRQHGIRRWPSRKINKVNNSLRKLQGEIESVRGIDGPFTVTSFTNSSISWPAPSDHKTFTTTHCTRPIAMEAKCLDSDSEPIIDKLSKYNCYFSDAIPGQRDIIAPRDESMERPMTSEFCLSSFSPQSSDPSFALEYKKRFCTERPKSEHMQIARSVSCKDLSELPHGLEWVTIKTSYQDDMVIRFRLSSGSGIFDLHREVSKRFKMEVGAFGIKYFDNDKGNWVLLSCDADLHKCIDASTSSGARVIRLSMTFSNQATRMREAQLI

SEQ ID NO: 643 - protein, 1231 aa, Bathycoccus prasinos
MRLKSGRSPRESETNSDMNRDEDITNASRGKTSTTFTTHEKKEGTVEDGSEQHPQFAVTLLEKHQEQQQQQQQQQNDLTSPPPTKGQDEKPNEMSRARRKKNEAIAVVSELYRLHEVGKKTNFRVTQEGLYQTMVELVNNISARVEKSNMVQMWVPRIAGKSVVMTTHGELCKISAKKKTHDSVLAKKFTENTTAFFFNCEVTNGEGMLGLPGRCYVLSRPEFTPSVTSYRPMEYVRVACAYECRIHTTMCLPVFLSEEAMKSERPFTILEVALCHMTESIGELYAATAHEFMKLGLFTTGHDRVGPERYMRKFIESTVETLAPGHANALELMCETLNVPFAQFWIESNGLIVTAGCPYFVKEKECQSYRDMSSQISLMIGQGPVGQAHSKETLIWVDDVQKASQIEWPLHHTSILLGLRGLCACKMRIDCVLPDGTKKKTDAILEILLNPKLQTSAEQIQTVEEVWSYLQRGVRVDNTKNAPDGASAPAVPDSPLAATAGVRGNDEQPASMLMELPDLTGKNNNTDTTREGKNNDDKTGKGKGAAPMTTLQAVEHISMVNKGPDEKNKTSAPWGITLELLQTQFSKHLKDAATDLGVGSTTLKRICRQYGIGRWPRRSLKSKQYKAMKEAAKQQSSQNKLRKARSSGGHSSGGSPRDGGSSFKSSGGDSDAVAGESVHGPGGRMSGGGSLSNLAKTGDGSPLGDGLFTMGSTGGAPIRGKEGSGGVGALLGSGEEGRSHGGFQAFRGIATQGQFDWGDEEERERGASWHAGSGFVSHGRLKNAKGQIVASGSQHGGHTASQFFGAQQHQQPHQSMPIAPAMQQGDFGLAAEKAETKTPNKKYKKDVAVGTKAGAGKAAVPFSFDDHFYETVHGAHNFSQQLYPHQYNNNDDSVHGSTYSESAHGGSHYNGGSMHGNPGGDHSVHGTTALAGILNNTLGGFDDDLFIANDTMEEADADMMAILLNEGEKVEEVPQLVVKFRVGADTIRFRLLHKWSVQMLLDRIRKLIVFPDSAKLKYMDDEDDMCILQSEHDLDECIKFTEHRKKESGNSGNNKSATNDPVVIGESNAQNNARQQQQQQQQQKQELLATGFAPNKPNGGEITIFICLADGSMPSLNAYELIKQDIHSIPPSLSASVNARRDQLTINVKVTHDNDTCRFLLEPKMNHVTLMEHVLKLFGIQKETSSSSHYHRLTYLDDSEEWITLAGDLDLDECRALCGCSPSLRMKLLDR

SEQ ID NO: 644 - protein, 1196 aa, Chlamydomonas reinhardtii
MNTGMAYNNGGELKQRLSRALLDVSGTLATVKSGALVQVWMPECTHDGTIVLSCQGLPFAVAGVGDLLALFRCVSVRYRFSTDVMKPSLMGAIGRVYSTLEPEMSHNVQKYDKQVYLRVSEAQRCRVHSTLIIPIFGSDARDTPLAVFELVQGDRDVTFPAVLSQLSASLQNVNLFTIDLETAATAAGLRKWPMHIDMLPASEFSSGAAGTAAGAAGGTAAAGSGPARLSPNGEGQGLHRRLGSARLADVAEDKEPAASSNVIATEEREHQSPSTSRQDEVGSWGAKRTSLTRVSTGNLHGAGGGAAGSGPVHMPTAAGGGATAGAGGIKLSSSPQTMQGPLAAAGTSPPGAGAGTGVPSVALSMPVPVPVQGMSQLTASGSGHAAGPGGAAAGLAGAGGSGLLPGSAPALLKLETAGSAGTSDGLGARQAMTPPAPVPGPPLDPNNAAQLMAWLSQQGNAGNAALDQIKALLEQQQQQQQQQQQQQQQQQQMQLQQQLQQLQALQQQQMQQQAQSQALQVRQARMSESMSVPGALAAQQLQLQQQQQQQQAPHQHQQGPMMMDVTVGSSGPLQHLAGAAVSTPSPPTTGSGLAQACSGDTNANAAGPNTLVAAVAAAAAAEQQQQQQQQAAAQMQQAAIQQAVAQASTAAAAAASMNNKLSRSGSAPRVQAAAAGAAAGDAGDDGDEEDISSGGDDDDSDDERGGGGNPRNNNRVGGGAGKRLRFEDLQAQFGLGLKEAANNLGICATTLKRACRRHGIKRWPRRQIAKLSKALNQMGYQGAPPPGLVQNAVINGVGPGGTATTATKPKPKPKPDPVALQHATQMLLAQQQAALVAAAAANGGNMAAFPSIAAAAAAGMMQVHQGHMAAAAMAPHGVYALTAGQQGAGGGGQPGSATAGGGQSMFPTHGTTTIMTPMGPMQVATQPGGGPGAGGQGMMVGGGGMQGGLTPMQMQAMGMQGTGAGGMGAVGLHPLLAAGGGYNIQQALQQHMQQQQQGMQQQQQQQQQPGAPLLGSMQNLQALQQQQQQQEALQQQQQLLQQQQQQHHHQFQHHQQQHQQQQQQSQQQVAGSSPGVSWLTHAMGGGGGGGGGGMHMGVMPPGTGCGSAATAMDIGPRVSAGDAPSPFSGLGLSPGITDSGIPDIPEDFIANLNGAGAGPGAGGGMAPMTASMFKTNAANSELLGLFDDELAGISAR

SEQ ID NO: 645 - protein, 754 aa, Chlamydomonas reinhardtii
MNTGMAYNNGGELKQRLSRALLDVSGTLATVKSGALVQVWMPECTHDGTIVLSCQGLPFAVAGVGDLLALFRCVSVRYRFSTDVMKPSLMGAIGRVYSTLEPEMSHNVQKYDKQVYLRVSEAQRCRVHSTLIIPIFGSDARDTPLAVFELVQGDRDVTFPAVLSQLSASLQNVNLFTIDLETAATAAGLRKWPMHIDMLPASEFSSGAAGTAAGAAGGTAAAGSGPARLSPNGEGQGLHRRLGSARLADVAEDKEPAASSNVIATEEREHQSPSTSRQDEVGSWGAKRTSLTRVSTGNLHGAGGGAAGSGPVHMPTAAGGGATAGAGGIKLSSSPQTMQGPLAAAGTSPPGAGAGTGVPSVALSMPVPVPVQGMSQLTASGSGHAAGPGGAAAGLAGAGGSGLLPGSAPALLKLETAGSAGTSDGLGARQAMTPPAPVPGPPLDPNNAAQLMAWLSQQGNAGNAALDQIKALLEQQQQQQQQQQQQQQQQQQMQLQQQLQQLQALQQQQMQQQAQSQALQVRQARMSESMSVPGALAAQQLQLQQQQQQQQAPHQHQQGPMMMDVTVGSSGPLQHLAGAAVSTPSPPTTGSGLAQACSGDTNANAAGPNTLVAAVAAAAAAEQQQQQQQQAAAQMQQAAIQQAVAQASTAAAAAASMNNKLSRSGSAPRVQAAAAGAAAGDAGDDGDEEDISSGGDDDDSDDERGGGGNPRNNNRVGGGAGKRLRFEDLQAQFGLGLKEAANNLGICATTLKRA

SEQ ID NO: 646 - protein, 477 aa, Chlorella variabilis
MAGEEPSGPRSLVLTAQDRAIVVSRLARAVLRFQDSFLCSEGSPAGLLCQASGMAVWLPEVVEDNQIVLKTKGLPFCVAGMGDLLALFRCISCRFAFGTNAAGSSGPFFRSGPRLHGMRACLGLSFADRRLEAQYVRQLDAAQAPADCAYSALCVVMAAVLVSQALEQADLHLIESALAAMFWMSLPLVVCLSSRSLYISYRSLWLCAWLLPAWWFMCQAAAAYSPHMQPAAPPLMPPPQPPEAGAWHHALSAATQRCRPAAQLIVRTSMLPLLWSNLGARQVFRRHWPLQAACLAIAASFNGRRCSWLLVRLPGVAAAAGRFSGDARKMSRLLTPQLLPMVAAQLREAGWRLGAGSGGTCSTHTADSSGSCAVAPPASTAAAAAGQGSQSEAPRQQLAACLEVLLFARLLLCYVAPCLALWHSELSSRRHFLDACSERSARSERLPRMPAFHLAWLAPLAVATCWQAAEAAVALGY

SEQ ID NO: 647 - protein, 727 aa, Coccomyxa subellipsoidea C-169
MVNTEVYDLPHSVEQRGAMASRIARAVLNFQDQLLEADSNTGSLCQVWLPEVSEDGDVVLRTKGLPFCVAGVGDLLALFRCISCRYCFGTDATKPDMLGAPGRVFTTQEPEMSRNVQKYSKEVYLRASEAQQCRVHSTVVLPLFTSADRKSSLGVVEVVQTRQDMSFAEIVSNLARSLEDCNLFTCEGLRGKEMAESSDAIKQMVKGGLVPSSSTRSNSSEADKAAATGDAENEGTSGLTGRASTASISVDLADAASLEAERKKSLGTRTRNASLAADLRAALRQQSLRDSAPKEALAAAAAAPTAGAGAEQMSARGGSLSEEEVDMDEDDDLEDETEEERARRKGKGAGNPGKPGKRLRLEDLQSQFGVGLKEAANRLGICPTTLKRACRRHGIQRWPRRQLLKLSRAIDQINATGSVKSADGSSPAANGLQPLPGPDTRWTALAQLIPGIAVQPDNRQPHKTLPSTQALALTHSTDQRMLQRVDSSASVDPYVAAAAAEQLQRYHSNGSLQQGSPVGAASAGYGLPSHASAQHLHRHDSGAVAGADALAGDGSVHRGQAAFQYLAAAGPSVDAHMQQAQHYGSANSTPMPIPAGSAAHLAHSYPGAMPVGTQPAMMPQVFDGGQQISAPLSMPAMSLSHVHPPTGQHQSPPMMVGGEGSYRGQDLLSYSNQRTMIDAKMDEHTHNWMQHAGNGAQHHLDLFPSVDDLDDDVGLVDAEVLEMLLSR

SEQ ID NO: 648 - protein, 779 aa, Coccomyxa subellipsoidea C-169
MSAGQTIVSWDMRYPAAFTYNPQNSRESASQHAQLNMKLAQVVVKFTSSLSSTGTGTLSQIWLPSISEDGSVVLGTQGVPFSVSGTVDLLALFRCISCRFKFTTDVTDPSNMGVVGRVFASGEPEFSHNVQTYSKSVYLRVSDAQRCRVHSTMLLPMYMDPQRDHPFAVFEVCQTEKNVLFPSLVDLFQRCLEDVNLYTVDIEKHSMGIGLRCWPSSLDYTGKDSASVATFAPEAAACTDMETLCSADSLQRLKAASVNGATDVHGEEVLRASSGVGGGKSEGMARLVSVGNRLELDLEPLLMTSKGGGGGGGGNCGLESGTQGSEALGSRRPPMRLEVGLPAAAAALLNGFDGDKARLKGQLSSFGLQYAAVPPRDMAQFGVGLREAAANLRICPTTLKRACRRHGITRWPRRQLAKLNRSEGSKSDGSGDLPNIKVEGSYRSAARLSGQQPAVSSAASPRTSAQLGAERREGVTTRSFSAATSAGRPAAPSGSSPGIFSPLDFPPDMQQQPFYLSGNPSSTGILDLFQSIGPSGSAGMDDLEALQERDPEFYNYLKQTDSGLLDFKEDDSDEEEAGGTSESIQDGEEEERGNERLPVIESGAAEEQLEDQEILTPKTLDAWCLEATQHASLRAMRKLLKVFRVACHYGDSEAEVHETLRATSSSVFNKLLIFMLKEADGIFRNLLDLPDDAAILSSSFKKTKSGMLVFILRKLRTSIPFMGYFQRLQRKYMRQAISIFSTNEAAPRVQALVFVRQMAVMLPEPAMDQAVKVSANAII

SEQ ID NO: 649 - protein, 878 aa, Gonium pectorale
MAYNQLVGGLDLKQRLSKALLDVSGSLASVKSGALVQGLPFSVAGVGDLLALFRCVSVRYRFSTDVMKPTLMGAIGRVYSTLEPEMSHNVQKYDKQVYLRVSEAQRCRVHSTLMVPIFGCGSRDTPLAVFELVQGDRDVTFPAVMSHLFNALQSVNLFTTDLETVASAAGLRKWPMHIDMLPTAELVGGVGAGRLSPTRDEQQRAGNEGAEQKPAASSNIVATGLEGNAQQIVSWLTTQGANGSVALGQLRALIEQQQQLQKQQAQAQALKAEQAAMAAAGTVNGQAPMPPGAVPPVNGDSPPTKNGLLAQIQQQQQQQAGWDLGASSASAVMASNDKANKLARSTSAPRALGTDADDGDGEDISSGGDDDDSDDERGGHRNNNRIGGGAGKRLRFEDLQAQFGLGLKEAANNLGICATTLKRACRRHGIKRWPRRQIAKLSKALNQMGYSGAPPSGMVQNAAVNGVGVSSATQAPAKPKPAKKPDPAALHQATQLFFQQQLSAAAVAANGGVFPNMAAAAAAQGMMMGAQVQVQGVPHGMHMAMFAGAGGHIAQAAAAAAAAQQQQQQQQQQQQQQQQQHLQQQGVYQGGPFMGASMGATMGAAMMAQHAAHAAGMNGSMAPGAHMLLANGMGGMHGMPGMAAMGAMQAGTVGGVQHSALSMQQLAAGGGAAGGAMHMQAAGGNGLALQGAPSGMLHPLLASTAGFQMQQALQQQQQQQQQQQQLQHHQQSMQAAQQLQQAMQQPHQQGSGAGSMSQLGSGDRVGWLNQGPASGGTMATAVSAGHTVGVSSSMDIVGPRPSCGDAPSPFSGLGMSPGFSGGAGDICLPEIPEEFLQNAMGQSGAGMGQSGKSGNMGAGSIELMDFHGDLLGDDLATR

SEQ ID NO: 650 - protein, 530 aa, Parachlorella kessleri
MAQQPRALVLAEDDRIVVIKRLARAVLKFQDNFLDRESSPAGLLCQASSTLVWLPEVTGENEVVLKTKGMPFCVAGLGDLLALFRCISCRFAFGTDVKKVSQLGAPGRVFTSSEPELTCNVQKYSKTAYLRKAEAEQCQVQSTLLLPVFLSSQRHGCVGVLEVVQTSEDMRFMEVAALIANVLEKCQLYTCPQSSIERQLSRATTVATVLLPPSVDILRPAQGGSEGSNGRANSTDGVPMADEGVLEQAALGGSTGQVASEGGLPAGAAAAGSDDEGYDDDDLESGDEGDEGVAEAGGGARPSRSGARSTGTAGDRPSRRRGKGSGNPGKPGVRLSLEDLQSQFGVGLKEAAARLGICPTTLKRACRQAEGGAGAGTRHGIQRWPRRQLMKVNQALDQMEAQAPLGALAQQAQQSQHMRKPMQQLGGGLGGLPAPDTRWTALAQFIPAFQQTLQYNDNLLGFGPGQGGQLGLPGLHQEQGDARPRQGSGSGALSHWVFVGGVAPVIVHGLLHTSVGIGGRKEAERQLHGR

SEQ ID NO: 651 - protein, 1107 aa, Physcomitrella patens
MELPQASRACVPRWRPTTEFGGHGQQQQVVSQAMGVLAGLGGSAGESKFVMDEAVLTDLMELEPLHEQLLGESWAEGNYGDYGGYLALPASSHGGVFAGPVPALASLQAFSYANGSLAASVQAFQQELMLQQALESSQQQSIPGASSSQSSLAMSSAVVSGMSSYSAAVGGRSLSSPSLSEAAHMLLGNQGLAGVVARDGRGMGDSRGGVDGRNGKVEIGEGGVVDKEDDKSSVSTVEGNPVSSGNLEAGVRRPRIAAELPLPLRDRMMEALRLIGQSLEDVLVQVWMPVVQGSRKCLLTREQPFVVEPNNEQLWLYRNMTEGYEFPAERAEGKVLELPGRVFTGQQAEWTPNVQYYSSQEYLRVKEAQRCDIRGSLAVPVLDPVSRQCVAVIELVGRAEKIQYGPDVDIIARALQAVNLTCPVGLETPPLERSSWGRQAALAEIAEVLKGVCEAHKLPLAQTWVPTYRYGGRGDAKAQSHNAVQVNGGRGVRKVVLRIVDGDGPCYVGEARMWGFRRACLEHALEKGQGVPGKAMLTNLPVFDSDVKSFSKDEYPLGHYAKLFGLVSAVAIRLRSVHTGDEDFILEFFLPMDCVESEKQQQMLNSLSITMQRICQSLRTLSERELEEERRVAMAESIEMQAKAVKLEAKEVCNKEDFLAWRGGFNRHGGGVNGEETSPAFSQVMQQQHGVQQAARFVPQRSALQQFSHGVLLGRGRDDGLRIPESHVYPGYHSEQLPVEQGLGMGGFGCPGLGQDVASHRRRFERRRGTTEKTIGLNVLQQYFAGSLKDAAKSIGVVSSLEEKVLDGSNGDDGQGRAQVDNGDMCRSNDGNSTSSGGSNPNVKAGYGSNGGHYCPGMSPLASGSMLTGGDADRGDDGGKRSVGTAFQGVGNAGKGSGAGKGQQASPLGRSGEQPVPGRGGAGRVSDLVRGATPRGWNESRVHGGGGALAALKGGDQHGSHGFSEDPVSSCNRANDGEEEVTGCGLESPGFGSSPASDCSSPSTGVNGTSNKKAWAGQEDGAAITVKVTHGLDTVRVKFSRNGSFVELKEEVRRRLKLVGQKFSLKYLDDDEEWMLLACDADLQESIDLMRVSGRHAIKLMVCNSML

SEQ ID NO: 652 - protein, 1244 aa, Physcomitrella patens
MELPQASRACVPRWRPTTEFGGHGQQQQVVSQAMGVLAGLGGSAGESKFVMDEAVLTDLMELEPLHEQLLGESWAEGNYGDYGGYLALPASSHGGVFAGPVPALASLQAFSYANGSLAASVQAFQQELMLQQALESSQQQSIPGASSSQSSLAMSSAVVSGMSSYSAAVGGRSLSSPSLSEAAHMLLGNQGLAGVVARDGRGMGDSRGGVDGRNGKVEIGEGGVVDKEDDKSSVSTVEGNPVSSGNLEAGVRRPRIAAELPLPLRDRMMEALRLIGQSLEDVLVQVWMPVVQGSRKCLLTREQPFVVEPNNEQLWLYRNMTEGYEFPAERAEGKVLELPGRVFTGQQAEWTPNVQYYSSQEYLRVKEAQRCDIRGSLAVPVLDPVSRQCVAVIELVGRAEKIQYGPDVDIIARALQAVNLTCPVGLETPPLERSSWGRQAALAEIAEVLKGVCEAHKLPLAQTWVPTYRYGGRGDAKAQSHNAVQVNGGRGVRKVVLRIVDGDGPCYVGEARMWGFRRACLEHALEKGQGVPGKAMLTNLPVFDSDVKSFSKDEYPLGHYAKLFGLVSAVAIRLRSVHTGDEDFILEFFLPMDCVESEKQQQMLNSLSITMQRICQSLRTLSERELEEERRVAMAESIEMQAKAVKLEAKEVCNKEDFLAWRGGFNRHGGGVNGEETSPAFSQVMQQQHGVQQAARFVPQRSALQQFSHGVLLGRGRDDGLRIPESHVYPGYHSEQLPVEQGLGMGGFGCPGLGQDVASHRRRFERRRGTTEKTIGLNVLQQYFAGSLKDAAKSIGGKRHWVRGEGMGRGGGRARAWRSAVDCVVVSSLEEKVLDGSNGDDGQGRAQVDNGDMCRSNDGNSTSSGGSNPNVKAGYGSNGGHYCPGMSPLASGSMLTGGDADRGDDGGKRSVGTAFQGVGNAGKGSGAGKGQQASPLGRSGEQPVPGRGGAGRVSDLVRGATPRGWNESRVHGGGGALAALKGGDQHGSHGFSEDPVSSCNRANDGEEEVTGCGLESPGFGSSPASDCSSPSTGVNGTSNKKAWAGQEDGAAITVKVTHGLDTVRVKFSRNGSFVELKEEVRRRLKLVGQKFSLKYLDDDEEWMLLACDADLQEMRCAGAVGARVVYANPSADVVEVKGTWSRIAVSGVVGRIERGILSTARELSAKPFCATARLCVFWSSCVLDDEDGKRHRGLLGAERSADFSVLEGVAALRAGLQHQYGISTASFYLGTPTKSQNVVCTPSQ

SEQ ID NO: 653 - protein, 1262 aa, Physcomitrella patens
MELLRSNPRCGPRTRRTTECGGHGQQQATGATRVVVAGGLGGGSAGEAKFVMDETVLMDLMELDSLSEQLLGETWAGDNHGDYGSYLAYPASCNGGMFAAAGPPPVSQSAQMYSYGNGSMAASLQAFQQELMLQQVVESCQQSIPVASSSPPSLPLSSAPVSGISSYGAAVGSRLLSSSSPSPSGTARTMPGNQSLAGMITGDGRGVGDPRGGVGGRSGVAEIRESGVVDREEEKSSLSTVEGNPVSSGNLEAGVRGPRISAGFPLPLRDRMMQALRLIGRSLKDELVQVWMPVVQGTRKCLMTRDQPFTVEPRNEQLWVYRSMSESYEFPAERVEGKVLGLPGRVFIGQKVEWTPNVQYYSIQEYLRVKEAQRCDIRGSLAVPVLDPVSHQCVAVIELVGRAEKVQYGPDVDIIARALQAVNLTCPVGLETPPLERSSWGRQAALSEMADVLKAVCEAHRLPFAQTWVPTCSYGSRSDAKAQGNNAEQVNGRCSRSKVVLRTVDGDGPCYVSDSRMLGFRRACLEHVLEKGQGVPGKAMLTNLPVFDSDVKSFSKDEYPLGHYAKLFGLVSAVAIRLRSVHSGDEDFILEFFLPTDCVDSEKQQVMLNSLSITMQRICQSLRTLSEKELEEERREALAESMEMQAKAVKEEAKEVSNKEDLLAAYGFNRHPGGGNGCEETTQAFPQVLQHHGVQQAAARCAVQRPPLQQFSRGMPTGRGCEEGLRILESHVYPWHHHPEQMGLEHGLGTGGFGCSSLHQDVASHRRRFERRRGTTEKTIGLNVLQQYFAGSLKDAAKSIGVCPTTLKRICRQHGISRWPSRKINKVSRSLKKLQGVIDSVQGAEGALRINALTGDLSSAAVAAAAVNGHMNKDMAASSQGNLSVSWSTPSLNSLDVKEAHGKLGSAEPLLGPKEESRRRHDPCSPQKLLLSMLKPTLQFRPEDDRIVSSLEVNAMSGASGGHGRVQLDNGDICRSNDRSSVSNIGSNPNVKAAYGSNGGHCRPGMSPLASGGILSSADTDRGCEGGHGGNRSSGNACQDVGNAGKVNGGGKGQQASPLGRPLEHLVPGRGGPGRPGDFIKAATSRGWNESRVHGGGGAMAALKGVDQYALYGPVDDPVSSCNHANGGEDEVTGRPGLCSLDSPGFGSSPASDCSSPSSGVNGTSNKKAWRGREDSAAITVKVTYGLDTVRVKFAQNVSFVELKEEVGRRLKLAGQNFNLKYLDDDEEWMLLACDADLQESIDLMRVSGRHAIKLMICSNML

SEQ ID NO: 654 - protein, 1211 aa, Physcomitrella patens
MDETVLMDLMELDSLSEQLLGETWAGDNHGDYGSYLAYPASCNGGMFAAAGPPPVSQSAQMYSYGNGSMAASLQAFQQELMLQQVVESCQQSIPVASSSPPSLPLSSAPVSGISSYGAAVGSRLLSSSSPSPSGTARTMPGNQSLAGMITGDGRGVGDPRGGVGGRSGVAEIRESGVVDREEEKSSLSTVEGNPVSSGNLEAGVRGPRISAGFPLPLRDRMMQALRLIGRSLKDELVQVWMPVVQGTRKCLMTRDQPFTVEPRNEQLWVYRSMSESYEFPAERVEGKVLGLPGRVFIGQKVEWTPNVQYYSIQEYLRVKEAQRCDIRGSLAVPVLDPVSHQCVAVIELVGRAEKVQYGPDVDIIARALQAVNLTCPVGLETPPLERSSWGRQAALSEMADVLKAVCEAHRLPFAQTWVPTCSYGSRSDAKAQGNNAEQVNGRCSRSKVVLRTVDGDGPCYVSDSRMLGFRRACLEHVLEKGQGVPGKAMLTNLPVFDSDVKSFSKDEYPLGHYAKLFGLVSAVAIRLRSVHSGDEDFILEFFLPTDCVDSEKQQVMLNSLSITMQRICQSLRTLSEKELEEERREALAESMEMQAKAVKEEAKEVSNKEDLLAAYGFNRHPGGGNGCEETTQAFPQVLQHHGVQQAAARCAVQRPPLQQFSRGMPTGRGCEEGLRILESHVYPWHHHPEQMGLEHGLGTGGFGCSSLHQDVASHRRRFERRRGTTEKTIGLNVLQQYFAGSLKDAAKSIGVCPTTLKRICRQHGISRWPSRKINKVSRSLKKLQGVIDSVQGAEGALRINALTGDLSSAAVAAAAVNGHMNKDMAASSQGNLSVSWSTPSLNSLDVKEAHGKLGSAEPLLGPKEESRRRHDPCSPQKLLLSMLKPTLQFRPEDDRIVSSLEVNAMSGASGGHGRVQLDNGDICRSNDRSSVSNIGSNPNVKAAYGSNGGHCRPGMSPLASGGILSSADTDRGCEGGHGGNRSSGNACQDVGNAGKVNGGGKGQQASPLGRPLEHLVPGRGGPGRPGDFIKAATSRGWNESRVHGGGGAMAALKGVDQYALYGPVDDPVSSCNHANGGEDEVTGRPGLCSLDSPGFGSSPASDCSSPSSGVNGTSNKKAWRGREDSAAITVKVTYGLDTVRVKFAQNVSFVELKEEVGRRLKLAGQNFNLKYLDDDEEWMLLACDADLQESIDLMRVSGRHAIKLMICSNML

SEQ ID NO: 655 - protein, 1151 aa, Physcomitrella patens
MPPSKTEVAMGANSGEIGSKFVVDDSLLSDLMDLDPLSEQLGEESWMNGGSGSDNCDFNLTSYSVSSSENCYASISPSSPPTSHSSSIFSQTSEADLDALQLLQQVFDGSPSPFSPPLSPSPVGDGNITMLLADQNIITTSNAMEYTDPSEKCRIDTPFLAMPNEEEEDEAEEKSGLSEEEKVVEEGGTRKRTLARALSSSPVCLRDRLLQAVRYIGRFRMDVLVQIWMPQQTSSNPQKRILTTRDQPFILEQRNDKLLHFRNASESYEFAAEAGNSGLGLPGRVFVHQMPEWSPNVQIYNCQEYLRHLEAQRCDVRGSLALPVFEPTTLQCVAVIELVGCTEKIQFFSDVDIISRAVQAVHLSSVNSLETPVPERLSLGRHSVLNEIAEVLTAVCETHKLPLAQTWVPACRYGSMDIKVHQSGSKRMRSENGSFLSHSASSCPCNSEILRTGDGPCYMNDGRICGFRRACLEHSVETGQGVVGKAFETNQPSFDSDVKTHSKAEYPLAHYAKCFGLGAAVAIRLRSVRTGNDDFILEFFLPPTCVDSKEQQLLLNSLSITMQRTCRSLRTVTDKELEEERSRTGNGNVVVKIEAKEEPNDGGSVLYPQNPIGNQEGMLFTSSGDRDQDQATHYQIPQPSLLNQFSFQRNSNWQPSDSLHPGEPQHHASYIDPLGNHALGCSNTAQDAASQRRRLDRRRGTTEKTIGLSVLQQYFAGSLKDAAKSIGVCPTTLKRICRQHGISRWPSRKINKVSRSLKKLQGVIDSVQGADGALRINALTGDITTASMAVDASTDHIGSDGACAKSKWCVSWSTPALRNHELEEHKVRGDTLSVPEEEDRKKHDSCSPQSVLMSILSFPTAKSSRICQANKSRDGSPAEDGSPMIGHNSGGRTTRILSPRRNLTVGTGDAAVHDGITVHHNLPVARSQQGSPISGSYDDIVSSTSKAGSIKNELPESMTSSGCQTQAHNDANAHEAFEEVCIKKLNVEVPVSSSSHREDGDQERKVMGGSGTFNSDSPRFGSSTAQGTSDCSSPSSEGNPSLHKKTWPTHGDVVTIKVTHDDDTVRFKLACDKSYLDLRDEVNQRLKLTKVTFDLKYLDDDEEWMLLACDADLQECLDVMRASGRSAIKLMVRCNVSSRAGTTCVDDKSQS

SEQ ID NO: 656 - protein, 1233 aa, Physcomitrella patens
MEMPPPNEQRFQPTLPRWRTSELLPFSQQLSPGGPFSGVDSKFLIDDSVLTDLMDLDPLCDQNTEPWAIVGQDFGLPFASFSPGVFSPGNFSPSAMSPPASQVSQSSQLYAQVNTLMAVPGGQFSSGVLVQDGGLSPSSSRLLDLLDQPATSEGYLVAMTPGAGANFAEMPQIYITHGQGSNPHSNSQGAAVTERLNDLGNDRINYGNNCGVVSMRANQGGELAPSSRVGELQDENSQLIDPASFDCTNGAQNAQYDMITKSENSRKRLMTVGTKESLKDRMMQALRLIGRSCVDVLAQVWMPVRTTDNQTVLSTREQPFVLERKTDHMWTYRSISENYVFAVTGGFPGLPGRVYLQQVPEWTPNVQFYSDHEYLRVKHAMACDVKGTLAVPVFEAGSRNCLAVIELVMKAEKVQYAPEIDIICRALQAVNLSCSDGMELPALEFRTQGRRVALAEISEVLTAVCETHNLPLAQTWVPGSHHSLEKPSNNKKSRIESGGNSKSSGGSYSSSRVCLRTGDGPHYVKDSKMWGFRQACLEHFLEKGQGVPGKAFASNQPAFESDVKNYSKIKYPLGHYAQLFGLTAAVAIRLRSIHTGTDDFVLEFFLPVNCTSSNDQQVMLNSLSITMQRVCRSLRTVTDKEFADEVKAATAEEKADAESTLSKAMDPLEDQGSGGASAMGSSFSENATEGDHLQEKLAQDPQVASASSLQRSQSVASKNVQMEESSEHVEPMSNGQKQTAAREAGALRTFTSIAQNAANPNRKLDKRRGTTEKTIGLDVLQQYFAGSLKDAAKSIGVCPTTLKRICRQHGIPRWPSRKINKVSRSLKKLQGVIESVQGADGALQINALSGDIASAAVAAAAVTGVPAAKDADTPEGRPAASPSDGHLNKQDGLINGESNQTPMSNLDEEFSPRDSQPSRHPAVASNLSYARVGSKDAANLANTTDTRSSPTDHTWNRNSDESSEGAGRDSTTYGDTQNFVTVSSEQELKGAVRKLDRKEDASANLDTPLLCLPNGSSSRSQCGASDSSMSEFCRNADSGSGTGFYGGAICVESRVHGGARALAALRDSDLSSYGNPVACGRYPLEDSPREVTGGHRTGSSQHNGSDSSSPSSGAGGHPRKHWPAPAPEPEAVTVKATFGADTVRFKLLVKSSYLELRTEISGRLKVDDQGFDLKYLDDEEEWMLITCDADVKECIEVARTLGRHTVKLMVRENGSRNSSGNNSNISLQVMTTS

SEQ ID NO: 657 - protein, 1162 aa, Physcomitrella patens
MPPSEREVAMGISTGDIVSKFVVDDGLLSDFMDLDSLSDQLDEEESWMDGASGSSSCDFTLTPYSMASSDNCYASFSPPSPVTSHSSSLYSSQTPSAAGLDGLQLLQQVLDGAPSAFPPPLSPSPVGSGNIDMLLSDQNLSSMENVVDYNDLFEKSRVNSSFLAMPSEDDEDEAEEKSGLSEEEKVVGEGETRKRTLTRALSSPPMSFRDRLLQAVRYIGRLRMDVLVQVWMPVVQQTSSSSSKRVLITRDQPFVLEQKNDKLSNFRSASEDYEFAADAGITGMGLPGRVFVHQMPEWSPNVQMYNCQEYLRHVEAQRCDVRGSLALPIMDPVSSQCVAVIELVGCTEKIQFHSDVDIVSRAVQAVHLSTVNSLETPVPERLSQGRQAVLNEIAEVLTAVCETHKLPLAQTWVPTYRYGSMDIKVHQSGSKRMRSENGSGLSRNTSSSPCSGEILRTGDGPCYVSDGRIWGFRRACLEHSLEKGQGVAGKAFETNQPNFDSDVKIHCKTEYPLAHHAKCFGLGAAVAIRLRSIRTGNDDFILEFFLPSTCVESKEQQLLLNSLSITMQRTCRSLRTITDEEEKEELHIAGNGNVLVKAEAKEEPIDGDCVFHPRTPYGSQEGISLISSGAKGEEQATHCQLPHPSLISQLSLQRNSNWQSSYLLNPSESQQHASKSEDSDPLVNHVLGLDRLGCSNAAQVAASQRRKLDRRRGTTEKTIGLSVLQQYFAGSLKDAAKSIGVCPTTLKRICRQHGISRWPSRKINKVSRSLKKLQGVIDSVQGADGALRINALTGDITTASMAADNGSGHAGSDGSCAKSKWSVSWSTPAPRNRDLEDHKVRGGTLLLPKEEDRKKHDSCSPQSVLMSILSSPETKPSRHWHTNEKSAGVSAEGNDLAVGHDSGFRGASTLSPGSNLTIDTGLAVVCDAVTAHHDLLGARSQQSSPSSGSYDDIAPPTSKVDSRGSGLPESKTGSGCQNQVHDSASAEVAIKDVCKKNKSPEVGVSSSSLNEDQEQEREVMGGSGTSNSPRFGSSTAQGTSDCSSPSSAGNPSSHMKTWPAHSDVITMKVTYNEDTVRFKLSSDKSYLDLRDQVNRRLKLAGLKFDLKYLDDDEEWMLLACDADLQECLEVMRVSRRNAVKLMVRCNVSSSVETSCADDKTLS

SEQ ID NO: 658 - protein, 1030 aa, Physcomitrella patens
MLLSDQNLSSMENVVDYNDLFEKSRVNSSFLAMPSEDDEDEAEEKSGLSEEEKVVGEGETRKRTLTRALSSPPMSFRDRLLQAVRYIGRLRMDVLVQVWMPVVQQTSSSSSKRVLITRDQPFVLEQKNDKLSNFRSASEDYEFAADAGITGMGLPGRVFVHQMPEWSPNVQMYNCQEYLRHVEAQRCDVRGSLALPIMDPVSSQCVAVIELVGCTEKIQFHSDVDIVSRAVQAVHLSTVNSLETPVPERLSQGRQAVLNEIAEVLTAVCETHKLPLAQTWVPTYRYGSMDIKVHQSGSKRMRSENGSGLSRNTSSSPCSGEILRTGDGPCYVSDGRIWGFRRACLEHSLEKGQGVAGKAFETNQPNFDSDVKIHCKTEYPLAHHAKCFGLGAAVAIRLRSIRTGNDDFILEFFLPSTCVESKEQQLLLNSLSITMQRTCRSLRTITDEEEKEELHIAGNGNVLVKAEAKEEPIDGDCVFHPRTPYGSQEGISLISSGAKGEEQATHCQLPHPSLISQLSLQRNSNWQSSYLLNPSESQQHASKSEDSDPLVNHVLGLDRLGCSNAAQVAASQRRKLDRRRGTTEKTIGLSVLQQYFAGSLKDAAKSIGVCPTTLKRICRQHGISRWPSRKINKVSRSLKKLQGVIDSVQGADGALRINALTGDITTASMAADNGSGHAGSDGSCAKSKWSVSWSTPAPRNRDLEDHKVRGGTLLLPKEEDRKKHDSCSPQSVLMSILSSPETKPSRHWHTNEKSAGVSAEGNDLAVGHDSGFRGASTLSPGSNLTIDTGLAVVCDAVTAHHDLLGARSQQSSPSSGSYDDIAPPTSKVDSRGSGLPESKTGSGCQNQVHDSASAEVAIKDVCKKNKSPEVGVSSSSLNEDQEQEREVMGGSGTSNSPRFGSSTAQGTSDCSSPSSAGNPSSHMKTWPAHSDVITMKVTYNEDTVRFKLSSDKSYLDLRDQVNRRLKLAGLKFDLKYLDDDEEWMLLACDADLQECLEVMRVSRRNAVKLMVRCNVSSSVETSCADDKTLS

SEQ ID NO: 659 - protein, 1251 aa, Physcomitrella patens
MEIPPPNERFQPTMPRWRTSELLALSQQLSPGGQFPGSDSKFLIDDTLLSDLMDLDPLCDQSGEPWVAAGQDFSLPFAAFSPGQFSPGNFSPSAMSPQPQSQASPNSQLYAQVNSGMAVPGGHLSPREILVQDGGLTPSPSRLVDLLEQPSTSEGYLVAMSPGTSANFAEMSQIYLSNGSTANSHANLHSNSHGAMVNERVINLGNNRSNYGRNCLTVTNATMERNPEGESLLRQAELRDEYAGQPMDPAAFEYINATQDAQYDMVTKSETSKKRLVVTGGSLTLKERITQALRFIGRSCVDVLAQVWMPVRTADNQTVLSTREQPFVLERKTDRMWTYRSISENYVFAVTGGFPGLPGRVYLQQVPEWTPNVQFYSDHEYLRVKHAMACDVKGTLAVPVFEASSRNCLAVIELVMKAEKVQYAPEIDIICRALQAVNLSCTDGMELPALEFRTQGRRAALAEISEVLTAVCETHNLPLAQTWVPGSHHSVDKPSSNKKCRVESGTNSKSSGGSHSSNRVCLCTGDGPHYVKDSKMWGFRQACLEHYLEKGQGVPGKAFASNQPAFESDVKNYSKIEYPLGHYAQLFGLTAAVAIRLRSIHTGADDFVLEFFLPVKCISSDDQQVMLNSLSITMQRVCRSLRTVTDKELADELKAASAEESTEAESNPPKPVDPAEEQRNAAASGIELPPSENATENPTVQEKQPQQISQEIPALPLERSQSLVSEKAQVGESNDNVEPLQLFEKQPAIQVPGAARTFTSTAQKAANQNRRLDRRRGTTEKTIGLDVLQQYFAGSLKDAAKSIGVCPTTLKRICRQHGISRWPSRKINKVSRSLKKLQGVIESVQGADGTLRINAFSGDIASAAVAAAAVTSTVPAAKDTTTEDGRSAASPSEACHNQHDGISNGESNQTPLSVEDEDSSPHDIQRLRHPTGASNLSMARAEPKVPVNLANANGTRPSLPIDHTRDRNSDESSGGAEFGSTNHGGADQDFYAVSAEQESDGTGRKLDIKEVSAKDPPTLYIPNGSSNPSHSGGSDWDRSPNGSMSDFGRNTDSGSGTGFNGGAICVESRVHGGASALAALRDSDLSSYGNPCDYERYALDDSPREVTGAHRTGSSHHNGSDSSSPSSGAGGYARKHYWPVPVVEPEAVTVKATFRADTVRFKLLVGSGYLDLRNEISRRLKVDEHGFDLKYLDDEEEWMLITCDADVKECIDVAQTLGRHTVKLMVRQSGSWTSSGNNSNVSLQDMNCHAA

SEQ ID NO: 660 - protein, 1252 aa, Physcomitrella patens
MELPQASRACVPRWRPTTEFGGHGQQQQVVSQAMGVLAGLGGSAGESKFVMDEAVLTDLMELEPLHEQLLGESWAEGNYGDYGGYLALPASSHGGVFAGPVPALASLQAFSYANGSLAASVQAFQQELMLQQALESSQQQSIPGASSSQSSLAMSSAVVSGMSSYSAAVGGRSLSSPSLSEAAHMLLGNQGLAGVVARDGRGMGDSRGGVDGRNGKVEIGEGGVVDKEDDKSSVSTVEGNPVSSGNLEAGVRRPRIAAELPLPLRDRMMEALRLIGQSLEDVLVQVWMPVVQGSRKCLLTREQPFVVEPNNEQLWLYRNMTEGYEFPAERAEGKVLELPGRVFTGQQAEWTPNVQYYSSQEYLRVKEAQRCDIRGSLAVPVLDPVSRQCVAVIELVGRAEKIQYGPDVDIIARALQAVNLTCPVGLETPPLERSSWGRQAALAEIAEVLKGVCEAHKLPLAQTWVPTYRYGGRGDAKAQSHNAVQVNGGRGVRKVVLRIVDGDGPCYVGEARMWGFRRACLEHALEKGQGVPGKAMLTNLPVFDSDVKSFSKDEYPLGHYAKLFGLVSAVAIRLRSVHTGDEDFILEFFLPMDCVESEKQQQMLNSLSITMQRICQSLRTLSERELEEERRVAMAESIEMQAKAVKLEAKEVCNKEDFLAWRGGFNRHGGGVNGEETSPAFSQVMQQQHGVQQAARFVPQRSALQQFSHGVLLGRGRDDGLRIPESHVYPGYHSEQLPVEQGLGMGGFGCPGLGQDVASHRRRFERRRGTTEKTIGLNVLQQYFAGSLKDAAKSIGVCPTTLKRICRQHGISRWPSRKINKVSRSLKKLQGVIDSVQGAEGALRISALTGDLSSAAVAAAAVSGHMNKGLAASSPGNLSVSWSTLSPSCVEGKEAHAKVGSAESLLGPKEENRRRHDPCSSQKVLLSMLKPTLQFRPEDDRVVSSLEGKVLGGSNGDDGQGRAQVDNGDMCRSNDGNSTSSGGSNPNVKAGYGSNGGHYCPGMSPLASGSMLTGGDADRGDDGGKRSVGTAFQGVGNAGKGSGAGKGQQASPLGRSGEQPVPGRGGAGRVSDLVRGATPRGWNESRVHGGGGALAALKGGDQHGSHGFSEDPVSSCNRANDGEEEVTGCGLESPGFGSSPASDCSSPSTGVNGTSNKKAWAGQEDGAAITVKVTHGLDTVRVKFSRNGSFVELKEEVRRRLKLVGQKFSLKYLDDDEEWMLLACDADLQESIDLMRVSGRHAIKLMVCNSML

SEQ ID NO: 661 - protein, 877 aa, Raphidocelis subcapitata
MAAAEVKARLSRAIHGLTVQLATHGGGAACSDGPDGRGGALLQVWMPSQAPDGTTVLSAQGLPFAVAGVGDLLALFRCVSCRYRFSTDESKPALMGAIGRVYSSCEPEMCNDLQKYDKEVYLRVSEAQRCRVQSTLVMPVFDGVWGPDGGAAATAGGGGDGGGGGGGGAPHAPVAVLEVVQSGREVMFPEVMGWMRACLQEVNLSTRDLESLRLELALGSSDEFQPAEDAAAAAAAGAAAAGAAAAPSQPVPVPQPAAAAPRVSADGRSPGGSAASPGGRSAGAQRLVPEGEAAAALAAAVTAATAARRQARSGDSSAPGSDGRPRAAGEPSSGAAAAAGTGTGVRVKQEASSQPGGVGSGGSGSGSAAGLGGVPTPEELRGLSADAMLALLPAGGSDPDRAQRVLAAIAAAAVTSPAALEALQRWHLRQGGEQRGGGGGRAAAAGAAGGEEDGDEDIADVDGADSASSDGGGDDAGGAGPAAPRSASADAAARVAAAAVAAAAAQPLGAGRRLTYEDLQSQFGVGLKEAAVNLGICATTLKRACRRHGITRWPRRQIAKLNRALAQAGYSGSEPGAVERTANATTGLSQAQAAAAAAASAPIAVPGAGGSGAAAAAAAPAPASASAPSGAIYLAHPGGGPLPVVVAGGAPLYAHPHAHHHAHAGVQIAFAPGSYPPAQMTAVPDGRGGYVLTSAPAPPPVMLQGGAGSAGSSLSSALAQAAAAPEPGVAPAPAASYVLVQGQNGQQQLVMLAPQQQLQQQQQQQQPGAYAAMAPGHPHAHAHHVAYLQLAPAAPQHGHQQPAAAAGMGGLDGAGFLDLMDGDDDLIMPSGGVDALIRELAGATPPPGTAPVPIPGTAPGAPGGAGGGQGDLAGVWD

SEQ ID NO: 662 - protein, 1003 aa, Volvox carteri
  f. nagariensis
MAHSSLGLLAGGSDLKQRLSKALLDVSGTLASVKSGALVQVWMPEHTHDGTIVLSCQGLPFAVAGVGDLLALFRCVSVRYRFSTDVMKPTLMGAIGRVYSTLEPEMSHNVQKYDKQVYLRVSEAQRCRVHSTLMVPVFGSDSRDTPLAVFELVQGDKDVTFPAVLSHLTASLQNVHLFTTDLETAAIAAGLRKWPMHIDMMPSAEHDSAGVGRLSPSRDEPRLMSNFQNMQAGAEEKEQAASSNVVSTEEKQSPNASKGDEAGSRACEWTSQSGAARLSVGNPIGQTCPAGQAPSSGLMATSGSGASRLMAGPAPAAPATMGPTLGICSNSGAAVGKPEAVAAQGFEVSTADGVGARRQSGTGPMEASNAQQFMSWLAQQNATGNNALGQLRTLLEQQQQRSKAEQSGGNLLGQQTASGTQPQSMDALAASMGASLGMVPPNMAASPTKGSVMQQHAAFDMAAATAATTAAATTTTTSDKQGNKLTRSGSVQRTLGAAADADDGDGEDISSGGEDDDSDDERPGGHRNNNRVGGGAGKRLRFEDLQAQFGLGLKEAANNLGICATTLKRACRRNGIKRWPRRQIAKLSKALNQMGYNGAPPPGLVQNAVVSAGASSGQAAVKPKPAKKPDAAALQQATQLLFQHQLGAAAAAAAAAGGGGMFTNLSTAGMVVGGQLQGIPQGLHGMYGVAGQPAQQQHQPPPQQAGMFSGPFMGPMGAIMAQHGGNVPSGVLGQGPQALLGAMGGIGGGLGAAIQMPVMGSLGGLQGSAMGPMQTAALGLQLQGAGGLQLQGAGSTGMPVHGHTGMLHPLLAGGSFNMHQALQQQQQFQQQLQAAHHQQQQQQQTSSLLQQQHAVLQQQMQIQQQVQQQQQQQQQQQQQLGPVALQQMGKPDAVSWLVQAQAQAAPQASLAANGMTTASSAMDISAPRISCGEAHSPFSALGMSPAMSGGNTELCGLAEIPEDFIQNLNSGGVSQFGQLLKSGTLGVGTMELMDLLGDDIAAR

SEQ ID NO: 663 - DNA, 471 bp, Medicago truncatula
atgattaaatcaaacgacgaaaaaaatatagaaaaagttgaagatgatttttgagtaacacatccctatataagatacggaaatcttaaacatagcaaaactgtatctatgatttaatgtgagaatctaaaacattacgattgcctatctcataaccatgcatatttgtatttgtatttgtacgagcattattacttaagcagatccgttaacactgattgccggcataataataataatcaagtttagtttaatttggtttcctgttgatcagacatgttccactgctcttgagactaattttctttattattttaggattaagatatgaggggaatttggaactcgaggacaaggtcaaggaggaaatcccaaggaaccttgcaagcaacttccaactggtccacaaaatattattctcaattaactaaattttacttttgatttgccacatacaccattggatggatc

SEQ ID NO: 664 - DNA, 532 bp, Trifolium pratense
ccatataaataaaagaaattaatgattaatcaaccacgcaaaaagaatttgagtataacacatccctatataagatatggaaatcttaaacatagcaaaactgtatctatgattttatgtgagaatctaaaacattacgattgcctatctcataaaccatgcatacttgtttgttgtacgagacgacgagagcattacttaagcaaatcctattaacactgattgccggcataataaatcaagtttagttttataatttggtttcctgttgatcagacatgttgcactgctctttagactaatttttttcattattttaatattaaacaaaaattatatgttaatgtcaaatctatagtttgtagagcctaatctttatattatgaagagaatttggaactcgaggagaaagtcaaggaggaaatcccaaggaaccttgcaaccaccttccaactggtccacatacaaattatttaattaattaattacttatttttttacttttgctttgccacatagtagtacatgtaat

SEQ ID NO: 665 - DNA, 515 bp, Cicer arietinum
tgttatagctaaaagaaaagaaaaaattagaaaaataaaacaagattttgagtaacacatccctatataagatatggaaatctaaaacataaccaaactgtatctatgattaaatgtgagaatctaaaacattacgattgcctatctcataaccatgcatatatatattacacttaattaagaagatcctgttaacactgattgccggcttaattaattaattatagtttaatttggtttcctgttgatcagacatgttgcactgctattcagagtaattttattcattattttaatactaaacaaaaattatgtgttcatgtcatatctatagtttatagagcctaatctataattacgatttgagagaatttggaactcgaggagaaagtcaagaatgaaatcccaaggaaacttgtaagcaccttccaactggtccacaaactaaaccatactatattgcttatttctttatttattaattaaatattctatttttttttttactttttctt

SEQ ID NO: 666 - DNA, 515 bp, Lotus japonicus
aattattgctgaaacaaaagactagtcaattattattttaaaaaatgaaaagaaaaaaacaattgttgctaacatccctataagatatggaaatccaaaacatagctagcaaactgtatctatgattaaatgtgagaatctaatacattacgattgtctatctcataaccatgcatacttatcttacttaagcagatctcgttaacattgatcgccggcatactaaactttagtttaatttatttcctgttgatcagacatgttgtgttgctgtcaaaggtaattttactaattaattaaacaataaactataattatgtgctatgtcaaatctatagtttcgtgtgcctaatctagattgcaatatgagggaatttggaactcgaggagtaacgagtagaggaggagatcccagcctccaaggggaccttacaagcaccttccagctggtccacaattcaaacacatacccttattttaattttcttgctttgccacatgcacttgtggaacaa

SEQ ID NO: 667 - DNA, 513 bp, Glycine max
ttatttttattataataataaataatcatgaaggggaaaataatttgcggaaaacatccctattaaaagatacagaaaatccaaagcaaagcgtgactgtatctatgattaaattggatgtgagaatctaaacattaggagcgcctatcttgcaagcatgccttgatcagatcctgtccacactaactgccggcatactccaagttccgttttcatttggtttcctgttagtcagacatattgccttgccattgaaaggaatatttatcattacttaatttatttgttatgtcaaatctatcttttgtggatcctcgtctcctactctacattgttaatatgtataattcaaattaagaatgagaatagaggaaaatcaagtcaaggaggagacccaaaggaaccttccaatcttctttcgtggttttattttaattttgagtcaataataaatatatttatggtgtaaagaaattttatattactatttagttacaaaatattaaatatgaa

SEQ ID NO: 668 - DNA, 499 bp, Cajanus cajan
atatatatatataatataagtgttaatagtccgggaggggaaaggaaattgcgggatgttaaaagatatgaaaatccaaagcaaagcgcaagtgtatctatgattaaattggatatgagaatcttgtaaccatgctttacattacacgagcatatcaattgccggcatgctccaactttagtttttatttggtttcctcttagtcggacatactgccatcctattgaaaggtacatttatcattacttaaatgtgttaacaaatttcatttccttatgtcaaatctataatttgtggatcctcgtatcccttgctctacattgtgtaaaattcaaatcaagaatttgaatgaagaaaaacaactcaaggaagagacgcaaaggaaccttccgaccttctttctattatttaattttaatttatgaaataaagtattaaataattttaaactttgtataaatctatagattttatttcaatatatactataagttattga

SEQ ID NO: 669 - DNA, 492 bp, Lupinus angustifolius
caataagcattgaatagaagagagagaaaatagaaaagaaaaggtaatgacggcaacatccctattaagtgtaatgtaagatatggaaatccgaaacatagctaaactgtatgaatgattaatgtgagaatctaaaacattacgagtgatatctcataagcatgcatatttatattactgaaagaaacatatcttgttaacactgattgcaggcatcctcaaatttggtattcggttgacaagacatgtcgcattgctatgtacattacttaaatactaaactaaaatatgtcaaatcaaatctctagatcctactaatctatatttatatttatgatatgagagaatttggaactcgaggagaaaaagagtgacggaggagatcccaatggaccttcccaagcatgccattatttttaaatatttctatcaaaatttcatgcaattcttaatattcccaattctcctgggaccgaccgattcagtaaccat

SEQ ID NO: 670 - DNA, 543 bp, Arachis duranensis
atatactgttatcatatgaaaagggaaaaacgccatcaatcagaatataaataaatacattagataggattattctaaggaaatctagaacattgcaaaactgaatctctatgaaatctaaaatgctaccggagcctaaatcctatccatgcataggtatattaaggagatcctgattgccggcaatagtcaagtatagtttaatctggtttcctgttaatcaggcatgctgcattgctatggaaagtaattttaatcattacttaaatactaaacttgttttcgttcatcagttaaacactaaactaaaattatgtgttatgtcaaatctgtgatttttagatcctaatctagattgggatatgacatatgagggaattaggaactcgaggcgaaacaaaacaagtcaattaagctaaggtgggatcggaggagatcccaaggaaccttccaatcaccttcccatccacactactctacaaattaaaccatgccattcattattttaactcctttttcgtagtcttccgtcacttgcacagc

SEQ ID NO: 671 - DNA, 25 bp, Medicago truncatula
tagaatcgccatgtggcgagcagag

SEQ ID NO: 672 - DNA, 25 bp, Arachis duranensis
tagagtcgccatgtggctcacgacg

SEQ ID NO: 673 - DNA, 25 bp, Cicer arietinum
tagaatcgccatgtggcgaacggag

SEQ ID NO: 674 - DNA, 25 bp, Lotus japonicus
tacgattgccatgtggcacgcagag

SEQ ID NO: 675 - DNA, 25 bp, Glycine max
taggattgccatgtggcgcgcaggg

SEQ ID NO: 676 - DNA, 25 bp, Lupinus angustifolius
tatgatctccatgtggcagacggag

SEQ ID NO: 677 - DNA, 25 bp, Cajanus cajan
taggattgccatgtggcgcacagag

SEQ ID NO: 678 - DNA, 25 bp, Trifolium pratense
taggatcgccatgtggcgagcgtag

SEQ ID NO: 679 - DNA, 5 bp, Artificial Sequence
  Synthetic Construct
  misc_feature 1: n = A or G
  misc_feature 5: n = A, T, or C
ngatn

SEQ ID NO: 680 - DNA, 5 bp, Artificial Sequence
  Synthetic Construct
  misc_feature 1: n = A or G
  misc_feature 5: n = A, T, or C
naatn

SEQ ID NO: 681 - DNA, 5 bp, Artificial Sequence
  Synthetic Construct
  misc_feature 1: n = A or G
  misc_feature 5: n = A, T, or C
nggtn

SEQ ID NO: 682 - DNA, 5 bp, Artificial Sequence
  Synthetic Construct
  misc_feature 1: n = A or G
  misc_feature 5: n = A, T, or C
ngacn

SEQ ID NO: 683 - DNA, 5 bp, Artificial Sequence
  Synthetic Construct
  misc_feature 1: n = A or G
  misc_feature 5: n = A, T, or C
nagtn

SEQ ID NO: 684 - DNA, 5 bp, Artificial Sequence
  Synthetic Construct
  misc_feature 1: n = A or G
  misc_feature 5: n = A, T, or C
nggcn

SEQ ID NO: 685 - DNA, 5 bp, Artificial Sequence
  Synthetic Construct
  misc_feature 1: n = A or G
  misc_feature 5: n = A, T, or C
naacn

SEQ ID NO: 686 - DNA, 5 bp, Artificial Sequence
  Synthetic Construct
  misc_feature 1: n = A or G
  misc_feature 5: n = A, T, or C
nagcn

SEQ ID NO: 687 - protein, 907 aa, Alnus glutinosa
MEIERKLMNMEYGTASFTAPNSATYGNFSPTDHTAAMEMDFMDELLLEGCWLETTRALNDPSPYYLPTLDSNINHHQQIYQEDQTVGVFPESETIIVEGTELGRRWWIGPRANPGPSSSVKERLMLAVGYLRECTKNMNVLLQLWVPVRRGGSRYFLTSQDQPYYRNVCRAYQFAVEEDMEESGGLPGRVFMGKLPDQWTPPDVRFFKRDEYPRINYAQQYDVRGSLALPVFERGSGTCLGVVEIVTTTQKINYRPELEHVCQALEAVDLRSSQYFSPPGIKACHDELYPAALAEIIEVLATVCKTHRLPLALTWAPCYQQGKGGCRQYSDENYAQCLSIVDTACFVADVDVLGFHEACSEHHLFRGQGTVGTAFTTAKPCFASDITAFSKTEYPLSHHARMFGLRAAVAIPLRSIYTGSADFVLEFFLPKDCQDTEEQKQMLNSLSIVLQQACRSLHAVIDKELPDEDEIIYPVKEVAIEECHKSGSSTLKEGSPKDQSSWIAHMMEAQQKGKGVSISLEYQEEEQNEEFKVTTHWDNINTQGGSCNGQAFSDFGQVQQSSGSKGSVEGGGDSYSYGSRRSSGGRKSGEKRRTKTEKTISLPVLRQYFAGSLKDAAKSIGVCPTTLKRICRQHGITRWPSRKIKKVGHSLRKLQLVIDSVQGAEGAIQIGSFYSNFPELSSPATSSFSSLKMSENSKQSNPIPESSGLFTPSKSPPSSCSQTSGPSIFCATAANHHHTTTINALSSGDTLMRENPIGILQMACSEADLHALNQQEANLLQNAMITCGLDTTLPVLPESSSHNSRDGGAFRVKATFGDEKIRFSLHPNWTFGDLQMEIRRRFNLDDISRVDLKYLDDDREWVLLTCDADFQECIDIYRASQSHTIRLSLQHASNPNLGSPFGSSGLS

SEQ ID NO: 688 - protein, 936 aa, Casuarina glauca; identical to SEQ ID NO: 24

SEQ ID NO: 689 - protein, 894 aa, Datisca glomerata
MMEYSAVYTSNIPTFPTPVQETNIELDFVDELLSDGCWLEVTDSSIRPLTDQSSYLQDNSHLITNPHHQIYQDHEDPDHHHQNQGSFSFHEIQSESVVIEGSDQITSRKWWIAPRSYPSHSSSVKERLMLAIGYLRECTKDRDVLIQIWVPARSKGSQQDVTTNYRKIIPGDNYHLGGGDEENWQEIGGVGYGYGYGLPCRGMMGKNMQDQWGFDVRFIRKDEYMRFSYGQQVDVRGCLALPVFERGSGICLGVVEILMTTQRQLNYRPELDYINEALESVDLRSFHNFSPPTIKGFDELYQAALGEIVEVLTSVCKTHRLPLALTWAPCSQQGKTGCYKHSDGNFAPCVSTVESACYVAEVDTLGFHEACLEQHLFKGQGIVGTSFTTNKPCFAVDITAFSKNEYPFCHHARIFGLRAAIAIPVRSTYTGSADFVLEFFLPKDCEDNEEQKRMLNSLSIVIQQSCRSLHIATDNKEVDGEENIVPQVSAASEASFPKESSWIAHMIEAQQKGKGISVSMEYQIEEPREEFKVTTHWDNIHGGLQNGQVFSEFGQLQQSSGAKGSVEGGADSYSFGSHQSSGGRKAGEKRRTKAEKTISLPVLRQYFAGSLKDAAKSIGVCPTTLKRICRQHGISRWPSRKIKKVGHSLRKLQLVIDSVQGAEGAIQIGSFYKSFPELSSPTFAGTSPFTSLNMTDHQAQFNHHQAESGLFSHGAPSKSPTSSCSHNSGPGAKQYSTINTLAGGDVLVTGRIGMLNRACSEAELYGLHQEEPKILRSQSPPSFGEHPDYLTPMHSAFKVKATLGEEKIRFSLQQNWGFRDLQLEIARRLNLDDVSRIDIKYVDDDHEWVLMTCDADLEECKEIYRSSHSHTIRLTLHWASHQTLVSSFGSSSPS

SEQ ID NO: 690 - protein, 868 aa, Datisca glomerata
MEYGALTVNSTYGNYTETTMELDFMDELLQGRWMDSSNGTNLLQSVSSVRALNNDSSNYVTPHEINTNHLMINPNHHVYEEDQANHETFLVEEVDQSSSRKWWISPRVYPEPSSCVKERLTLALRYLKDCLTNRDLLIQMWMPVRRGDKLVLTTHDQPYLLEPSCVSLANYRKVLSGYEFAAEEEGEESVGLAGRAYVGKLPEWTPDVRYFKRHEYPLIRYAEEYNVRGSLALPVFERGSGACLGVVEIVTTTQRVNYRPELDFITQALESVDLRSFQNFIPPIVKTCDELYQAALTEILEVVTSVCKTHRLPLALTWAPCSQQGKGGCRHSDQTYTRCVSTVDSACFVSDLETTGFHEACAEHHLFRGQGIVGTAFTTKKPCFAVDVTAFSKTEYPLSHHARMFGLVAAVAIPLRSVYTGPAEFVLEFFLPKECRNNDEQKRMLNSLSIVIQQSCRSLHVVTDNELEEEITEKAKPGPSTLEGDHHCTKDQSSWIAHMMEAQEKGKGVSLSLQYQTDEAEEEREGFRVTSYWDATQGGGLTNGEVITEFGELQQSSGLKSGDEGGGDSYSFGSRRGGRKAGEKRRTKAEKTISLSVLRQYFAGSLKDAAKSIGVCPTTLKRICRQHGITRWPSRKIKKVSHSLRKLQLVIDSVQGAEGSIQISSFYKSFPELGSTNVDVNDQFSSLKINYQNQHQAESGLFSHGAPAKSPASSSSQNSIPTRPNHHHMIANVNAFSGGDFLITEDPVGVMNRGSSEEPFGELMTNNNGCFKVKANFVDKKIRFILQPSWGFRDLQLEIGRRFNLEEMRGVEIKYLDDDHELVLMTCDADLEECKEIYSSSQNNTIVLSLSWASHQNPAKSYGKSSPS

SEQ ID NO: 691 - protein, 908 aa, Discaria trinervis
MEYSGAMVPNSTYGNFPNSESDFMEELLFEGCWLESSSGFNFMQSTSNPRSLLLDPSHYMPSFDSSALSQRRQIYNEDDDDNDEQQESSKRVWIGPRAYPNPSSSVKERLMMAVGYLKDCTRDRDVLIQIWVPIRRGGRQMLTTCNQPYSLNPDCKSLANYRAVSSGYHLLTEEDSGESVGLPGRTFLGKLPDWTPDVRFFRSYEYPRVSYAQQYDVRGSLALPIFERGSGSCLGVVEIVMTTQKVNYRPELEYVCQALEAVDLRSSQNFIPPNIKACDELYQAALSEIVEVLTSVCKTHRLPLALTWAPCVQQGKGGCRHSDENYARCVSTVDSACLVIDLDIMGFHEACSEHHLFRGQGIVGTAFSTNKPCFATDITAFSKTEYPLSHHARMFGLHAAVAIPLRSVYTGSSDFVLEFFLPKDCHDPEEQKQMLNSLSIVIQQACRSLYVVVDKEPEEAMLPIRETIIPSDVRLGKEESQKLGSPSEETSQKESSWIAHMMEAQQQGKCLSVSLDYQMEEPKEEFRVTTHWDSNQGGLPNGQVFSDFGQLQQSSGPKVSVEGGGDSYSFGGRRSSGGRKAGEKRRTKSEKTISLQVLRQYFAGSLKDAAKSIGVCPTTLKRICRQHGITRWPSRKIKKVGHSLRKLQLVIDSVQGAEGAIQIGSFYSSFPELSSPKFPGSDPFSSMKSSDQSKQLNSQTESGLFSQGGTMKSPSSSCSQTSGPSVCAAGVQQHITNINGMSSADALMAEDPVGMLKRACSDAELLACNLEETKIMPRSLSYKALSENRTLESLPPLPGSSGWNFRDGGALRVKANFGDEKIRFSLQSNCSFGDLQLEIARRFNLDDISNIDIKYLDDDREWVLLTCNADLEECMEIYKSSQSRTLRLSLQRAPYPNLGSSFGSSSPS

SEQ ID NO: 692 - protein, 936 aa, Dryas drummondii
MDYGGLMPNPSYGTLSDTTMEVDFMDELLFQGCWLESNPGLNLLQQQHQQPAGPPVSRALTDHPSHYFLPYESNPTAAHLSITPHQHQQIYQEDTDGSYPESHSSFVVEGNTEAGRRLWIGPRANPGPSSSVKERLMLAIGYLKECTKGRDVLIQIWVPIKRGGRQYLTTHDQPFSLDPNCKSLAGYRNVSKDYQFITDEDSAESVGLPGRAFLEKLPEWTPDVRFFRSYEYPRIEYAQQYDVRGSLALPIFERGSGTCLGVVEIVMTTQKVNYRPELEYVCQALEAVDLRSSQNFCPPCVKTCDELYQAALAEIVEVLTSVCKTHRLPLAQTWAPCVQQGKGGCRHSDENYAHCVSTVDVACFVADLDILGFHDACSEHHLFRGQGIVGTAFTTNKPCFATDIKAFSKTEYPLSHHARMFGLHAAVAIPFRSVYTGPADFVLEFFLPKDCQDHEEQKQMLNSLCIVIQQACRSLHVDVDKELEEEVMFPVRESVVASDMGLHKEETQKLISSPTEEPSAKESSWIAHMIEAQQKGKGVSVSLDYQTEEPKEEFKVTTHWDNTQGSLHNGQVFSEFGQLHQSCGPNGNVEGGADSYSFGGRRTSGGRKAGEKRRTKTEKTISLPVLRQYFAGSLKDAAKSIGVCPTTLKRICRQHGITRWPSRKIKKVGHSLKKLQLVIDSVQGAEGAIHIGSFYSSFPELNSPKFPGSGQYSSLNMSDHSKQVNPQHENGLFSHGTTTKSPSSSCSQTSGPSVCVPGAHQHPVTINALSSGDAFMTEDPVGVLKRACGDASLHASFQEETKLIHRSQSHKSFSDNLTYENLPPLAGSSSRNSRDGGLYRVKATFRDEKIRFSMLPNSSFRDLQLEIARRFNLDDVSRIEIKYLDDDREWVLLQCDADLEECMEIYSSSPGRTVRLCLQQAFYPNLASSYGNSSPS

SEQ ID NO: 693 - protein, 936 aa, Purshia tridentata
MDYGGLMSNPSYGTLSDTTMEVDFMEELLFEGCWLESNSGHNLLQQQHQQPTGPPVSRALTDHPSHYFPPYESNPTAAHLSITPHQHQQIYQEDTDGSYPESHSSFVVEGNTEAGRRLWIGPRANPGPSSSVKERLMLAIGYLKECTKGRDVLIQIWVPIKRGGKQYLTTHDQPFTLDPNCKSLAGYRNVSKDYQLITDEDSAESVGLPGRAFLGKLPEWTPDVRFFRSYEYPRIEYAQQYDVRGSLALPIFERGSGTCLGVVEIVMTTQKVNYRPELEYVCQALEAVDLRSSQNFCPPCVKTCDELYQAALAEIVEVLTSVCKTHRLPLAQTWAPCVQQGKGGCRHSDENYAHCVSTVDVACFVADLDILGFHDACSEHHLFRGQGIVGTAFTTNKPCFATDIKAFSKTEYPLSHHARMFGLHAAVAIPFRSVYTGPADFVLEFFLPKDCQDHEEQKLMLNSLCIVIQQACRSLHVDVDKELEEEVMFPVRESVVASDVGLHKEETQKLISSPTEEPSAKESSWISHMIEAQQKGKGVSVSLDYQTEEPKEEFKVTTHWDNTQGSLHNGQVFSEFGQLHQSSGPHGNVEGGADSYSFGGRRTSGGRKAGEKRRTKTEKTISLPVLRQYFAGSLKDAAKSIGVCPTTLKRICRQHGITRWPSRKIKKVGHSLKKLQLVIDSVQGAEGAIHIGSFYSSFPELNSPKFPGSGQYSSLNMSDHSKQVNPQHESGLFSHGTTTKSPSSSCSQTSGPSVCVPGAHQHPVTINALSSGDAFMTEDPVGVLKRACGDAEFHASFQEETKLIHRSQSHKSFSDNLTYENLPPLPGSSSRNSRDGGLYRVKATFRDEKIRFSMLPNCSFRDLQLEIARRFNLDDISRIEIKYLDDDREWVLLQCDADLEECMEIYSSSPGRTVRLCLQQAFYPNLGSSYGNSSPS
